(19) United States
(12) Patent Application Publication
(10) Pub. No.: US 2016/0152707 A1
(43) Pub. Date: Jun. 2, 2016

(54) CROSS-SPECIES-SPECIFIC BISPECIFIC BINDERS

(71) Applicant: AMGEN RESEARCH (MUNICH) GMBH, Munich (DE)

(72) Inventors: Peter Kufer, Munich (DE); Tobias Raum, Munich (DE); Roman Kischel, Munich (DE); Ralf Lutterbüse, Munich (DE); Patrick Hoffmann, Munich (DE); Matthias Klinger, Munich (DE); Doris Rau, Munich (DE); Susanne Mangold, Munich (DE)

(21) Appl. No.: 14/947,902

(22) Filed: Nov. 20, 2015

Related U.S. Application Data
(63) Continuation of application No. 13/408,363, filed on Feb. 29, 2012, now abandoned.
Application No. 13/408,363 is a continuation of application No. 12/594,729, filed on Oct. 7, 2009, now abandoned.
(60) Provisional application No. 60/913,668, filed on Apr. 24, 2007.

(30) Foreign Application Priority Data
Apr. 3, 2007 (EP) 07006988.5
Apr. 3, 2007 (EP) 07006990.1
Oct. 22, 2007 (EP) 07020640.4
Oct. 22, 2007 (EP) 07020641.2
Oct. 22, 2007 (EP) 07020646.1
Mar. 13, 2008 (EP) 08004741.8

(51) Int. Cl. C07K 16/28; C07K 16/42; C07K 16/40

(52) U.S. Cl. CPC C07K 16/2809; C07K 16/40; C07K 16/4291; C07K 2317/565; C07K 2317/31; C07K 2317/622

(57) ABSTRACT

The present invention relates to a polypeptide comprising a first human binding domain capable of binding to an epitope of human and non-chimpanzee primate CD3 epsilon (CD3ε) chain and a second binding domain capable of binding to EGFR, Her2/neu or IgE of a human and/or a non-chimpanzee primate as well as to a process for the production of the mentioned polypeptide. The invention further relates to nucleic acids encoding for the polypeptide, to vectors comprising the same and to host cells comprising the vector. In another aspect, the invention provides for a pharmaceutical composition comprising the mentioned polypeptide and medical uses of the polypeptide.

[0001] The present invention relates to a polypeptide comprising a first human binding domain capable of binding to an epitope of human and non-chimpanzee primate CD3 (epsilon) and a second binding domain capable of binding to EGFR, Her2/neu or IgE of a human and/or a non-chimpanzee primate as well as to a process for the production of the mentioned polypeptide. The invention further relates to nucleic acids encoding for the polypeptide, to vectors comprising the same and to host cells comprising the vector. In another aspect, the invention provides for a pharmaceutical composition comprising the mentioned polypeptide and medical uses of the polypeptide.

[0002] T cell recognition is mediated by clonotypically distributed alpha beta and gamma delta T cell receptors (TcR) that interact with the peptide-loaded molecules of the peptide MHC (pMHC) (Davis & Bjorkman, Nature 334 (1988), 395-402). The antigen-specific chains of the TcR do not possess signalling domains but instead are coupled to the conserved multisubunit signaling apparatus CD3 (Call, Cell 111 (2002), 967-979, Alarcon, Immunol. Rev. 191 (2003), 38-46, Malissen Immunol. Rev. 191 (2003), 7-27). The mechanism by which TcR ligation is directly communicated to the signalling apparatus remains a fundamental question in T cell biology (Alarcon, loc. cit.; Davis, Cell 110 (2002), 285-287). It seems clear that sustained T cell responses involve coreceptor engagement, TcR oligomerization, and a higher order arrangement of TcR-pMHC complexes in the immunological synapse (Davis & van der Merwe, Curr. Biol. 11 (2001), R289-R291, Davis, Nat. Immunol. 4 (2003), 217-224). However very early TcR signalling occurs in the absence of these events and may involve a ligand-induced conformational change in CD3 epsilon (Alarcon, loc. cit., Davis (2002), loc. cit., Gil, J. Biol. Chem. 276 (2001), 11174-11179, Gil, Cell 109 (2002), 901-912). The epsilon, gamma, delta and zeta subunits of the signaling complex associate with each other to form a CD3 epsilon-gamma heterodimer, a CD3 epsilon-delta □heterodimer, and a CD3 zeta-zeta homodimer (Call, loc. cit.). Various studies have revealed that the CD3 molecules are important for the proper cell surface expression of the alpha beta TcR and normal T cell development (Berkhout, J. Biol. Chem. 263 (1988), 8528-8536, Wang, J. Exp. Med. 188 (1998), 1375-1380, Kappes, Curr. Opin. Immunol. 7 (1995), 441-447). The solution structure of the ectodomain fragments of the mouse CD3 epsilon gamma heterodimer showed that the epsilon gamma subunits are both C2-set Ig domains that interact with each other to form an unusual side-to-side dimer configuration (Sun, Cell 105 (2001), 913-923). Although the cysteine-rich stalk appears to play an important role in driving CD3 dimerization (Su, loc. cit., Borroto, J. Biol. Chem. 273 (1998), 12807-12816), interaction by means of the extracellular domains of CD3 epsilon and CD3 gamma is sufficient for assembly of these proteins with TcR beta (Manolios, Eur. J. Immunol. 24 (1994), 84-92, Manolios & Li, Immunol. Cell Biol. 73 (1995), 532-536). Although still controversial, the dominant stoichiometry of the TcR most likely comprises one alpha beta TcR, one CD3 epsilon gamma heterodimer, one CD3 epsilon delta heterodimer and one CD3 zeta zeta homodimer (Call, loc. cit.). Given the central role of the human CD3 epsilon gamma heterodimer in the immune response, the crystal structure of this complex bound to the therapeutic antibody OKT3 has recently been elucidated (Kjer-Nielsen, PNAS 101, (2004), 7675-7680).

[0003] A number of therapeutic strategies modulate T cell immunity by targeting TcR signaling, particularly the anti-human CD3 monoclonal antibodies (mAbs) that are widely used clinically in immunosuppressive regimes. The CD3-specific mouse mAb OKT3 was the first mAb licensed for use in humans (Sgro, Toxicology 105 (1995), 23-29) and is widely used clinically as an immunosuppressive agent in transplantation (Chatenoud, Clin. Transplant 7 (1993), 422-430, Chatenoud, Nat. Rev. Immunol. 3 (2003), 123-132, Kumar, Transplant. Proc. 30 (1998), 1351-1352), type 1 diabetes (Chatenoud (2003), loc. cit.), and psoriasis (Utset, J. Rheumatol. 29 (2002), 1907-1913). Moreover, anti-CD3 mAbs can induce partial T cell signalling and clonal anergy (Smith, J. Exp. Med. 185 (1997), 1413-1422). OKT3 has been described in the literature as a potent T cell mitogen (Van Wauve, J. Immunol. 124 (1980), 2708-18) as well as a potent T cell killer (Wong, Transplantation 50 (1990), 683-9). OKT3 exhibits both of these activities in a time-dependent fashion; following early activation of T cells leading to cytokine release, upon further administration OKT3 later blocks all known T cell functions. It is due to this later blocking of T cell function that OKT3 has found such wide application as an immunosuppressant in therapy regimens for reduction or even abolition of allograft tissue rejection.

[0004] OKT3 reverses allograft tissue rejection most probably by blocking the function of all T cells, which play a major role in acute rejection. OKT3 reacts with and blocks the function of the CD3 complex in the membrane of human T cells, which is associated with the antigen recognition structure of T cells (TCR) and is essential for signal transduction. Which subunit of the TCR/CD3 is bound by OKT3 has been the subject of multiple studies. Though some evidence has pointed to a specificity of OKT3 for the epsilon-subunit of the TCR/CD3 complex (Tunnacliffe, Int. Immunol. 1 (1989), 546-50; Kjer-Nielsen, PNAS 101, (2004), 7675-7680). Further evidence has shown that OKT3 binding of the TCR/CD3 complex requires other subunits of this complex to be present (Salmeron, J. Immunol. 147 (1991), 3047-52).

[0005] Other well known antibodies specific for the CD3 molecule are listed in Tunnacliffe, Int. Immunol. 1 (1989), 546-50. As indicated above, such CD3 specific antibodies are able to induce various T cell responses such as lymphokine production (Von Wussow, J. Immunol. 127 (1981), 1197; Palacious, J. Immunol. 128 (1982), 337), proliferation (Van Wauve, J. Immunol. 124 (1980), 2708-18) and suppressor-T cell induction (Kunicka, in “Lymphocyte Typing II” 1 (1986), 223). That is, depending on the experimental conditions, CD3 specific monoclonal antibody can either inhibit or induce cytotoxicity (Leewenberg, J. Immunol. 134 (1985), 3770; Phillips, J. Immunol. 136 (1986) 1579; Platsoucas, Proc. Natl. Acad. Sci. USA 78 (1981), 4500; Itoh, Cell. Immunol. 108 (1987), 283-96; Mentzer, J. Immunol. 135 (1985), 34; Landegren, J. Exp. Med. 155 (1982), 1579; Choi (2001), Eur. J. Immunol. 31, 94-106; Xu (2000), Cell Immunol. 200, 16-26; Kimball (1995), Transpl. Immunol. 3, 212-221).

[0006] Although many of the CD3 antibodies described in the art have been reported to recognize the CD3 epsilon subunit of the CD3 complex, most of them bind in fact to conformational epitopes and, thus, only recognize CD3 epsilon in the native context of the TCR. Conformational epitopes are characterized by the presence of two or more discrete amino acid residues which are separated in the primary sequence, but come together on the surface of the molecule when the polypeptide folds into the native protein/antigen (Sela, (1969) Science 166, 1365 and Laver, (1990) Cell 61, 553-6). The conformational epitopes bound by CD3 epsilon antibodies described in the art may be separated in two groups. In the major group, said epitopes are being formed by two CD3 subunits, e.g. of the CD3 epsilon chain and the CD3 gamma or CD3 delta chain. For example, it has been found in several studies that the most widely used CD3 epsilon monoclonal antibodies OKT3, WT31, UCHT1, 7D6 and Leu-4 did not bind to cells singly transfected with the CD3-epsilon chain. However, these antibodies stained cells doubly transfected with a combination of CD3 epsilon plus either CD3 gamma or CD3 delta (Tunnacliffe, loc. cit.; Law, Int. Immunol. 14 (2002), 389-400; Salmeron, J. Immunol. 147 (1991), 3047-52; Coulie, Eur. J. Immunol. 21 (1991), 1703-9). In a second smaller group, the conformational epitope is being formed within the CD3 epsilon subunit itself. A member of this group is for instance mAb APA 1/1 which has been raised against denatured CD3 epsilon (Risueno, Blood 106 (2005), 601-8). Taken together, most of the CD3 epsilon antibodies described in the art recognize conformational epitopes located on two or more subunits of CD3. The discrete amino acid residues forming the three-dimensional structure of these epitopes may hereby be located either on the CD3 epsilon subunit itself or on the CD3 epsilon subunit and other CD3 subunits such as CD3 gamma or CD3 delta.

[0007] Another problem with respect to CD3 antibodies is that many CD3 antibodies have been found to be species-specific. Anti-CD3 monoclonal antibodies—as holds generally true for any other monoclonal antibodies—function by way of highly specific recognition of their target molecules. They recognize only a single site, or epitope, on their target CD3 molecule. For example, one of the most widely used and best characterized monoclonal antibodies specific for the CD3 complex is OKT-3. This antibody reacts with chimpanzee CD3 but not with the CD3 homolog of other primates, such as macaques, or with dog CD3 (Sandusky et al., J. Med. Primatol. 15 (1986), 441-451). The anti-CD3 monoclonal antibody UCHT-1 is also reactive with CD3 from chimpanzee but not with CD3 from macaques (own data). On the other hand, there are also examples of monoclonal antibodies, which recognize macaque antigens, but not their human counterparts. One example of this group is monoclonal antibody FN-18 directed to CD3 from macaques (Uda et al., J. Med. Primatol. 30 (2001), 141-147). Interestingly, it has been found that peripheral lymphocytes from about 12% of cynomolgus monkeys lacked reactivity with anti-rhesus monkey CD3 monoclonal antibody (FN-18) due to a polymorphism of the CD3 antigen in macaques. Uda et al. described a substitution of two amino acids in the CD3 sequence of cynomolgus monkeys, which are not reactive with FN-18 antibodies, as compared to CD3 derived from animals, which are reactive with FN-18 antibodies (Uda et al., J Med Primatol. 32 (2003), 105-10; Uda et al., J Med Primatol. 33 (2004), 34-7).

[0008] While this discriminatory ability, i.e. the species specificity, inherent to CD3 monoclonal antibodies and fragments thereof is a significant impediment to their development as therapeutic agents for the treatment of human diseases. In order to obtain market approval any new candidate medication must pass through rigorous testing. This testing can be subdivided into preclinical and clinical phases: Whereas the latter—further subdivided into the generally known clinical phases I, II and III—is performed in human patients, the former is performed in animals. The aim of pre-clinical testing is to prove that the drug candidate has the desired activity and most importantly is safe. Only when the safety in animals and possible effectiveness of the drug candidate has been established in preclinical testing this drug candidate will be approved for clinical testing in humans by the respective regulatory authority. Drug candidates can be tested for safety in animals in the following three ways, (i) in a relevant species, i.e. a species where the drug candidates can recognize the ortholog antigens, (ii) in a transgenic animal containing the human antigens and (iii) by use of a surrogate for the drug candidate that can bind the ortholog antigens present in the animal. Limitations of transgenic animals are that this technology is typically limited to rodents. Between rodents and man there are significant differences in the physiology and the safety results cannot be easily extrapolated to humans. The limitations of a surrogate for the drug candidate are the different composition of matter compared to the actual drug candidate and often the animals used are rodents with the limitation as discussed above. Therefore, preclinical data generated in rodents are of limited predictive power with respect to the drug candidate. The approach of choice for safety testing is the use of a relevant species, preferably a lower primate. The limitation now of the CD3 binding molecules suitable for therapeutic intervention in man described in the art is that the relevant species are higher primates, in particular chimpanzees. Chimpanzees are considered as endangered species and due to their human-like nature, the use of such animals for drug safety testing has been banned in Europe and is highly restricted elsewhere.

[0009] The present invention relates to a polypeptide comprising a, preferably human, first binding domain capable of binding to an epitope of human and non-chimpanzee primate CD3ε (epsilon) chain and a second binding domain capable of binding to EGFR, Her2/neu or IgE of a human and/or a non-chimpanzee primate, wherein the epitope is part of an amino acid sequence comprised in the group consisting of SEQ ID NOs. 2, 4, 6, or 8. Sequences as shown in SEQ ID NOs. 2, 4, 6 and 8 and fragments thereof are context independent CD3 epitopes.

[0010] The advantage of the present invention is the provision of a polypeptide comprising a, preferably human, binding domain exhibiting cross-species specificity to human and non-chimpanzee primate CD3ε (epsilon) chain, which can be used both for preclinical evaluation of safety, activity and/or pharmacokinetic profile of these, preferably human, binding domains in primates and—in the identical form—as drugs in humans. The same molecule can be used in preclinical animal studies as well as in clinical studies in humans. This leads to highly comparable results and a much-increased predictive power of the animal studies compared to species-specific surrogate molecules. In the present invention, an N-terminal 1-27 amino acid residue polypeptide fragment of the extracellular domain of CD3 epsilon was surprisingly identified which—in contrast to all other known epitopes of CD3 epsilon described in the art—maintains its three-dimensional structural integrity when taken out of its native environment in the CD3 complex (and fused to a heterologous amino acid sequence such as EpCAM or an immunoglobulin Fc part).

[0011] The context-independence of the CD3 epitope provided in this invention corresponds to the first 27 N-terminal amino acids of CD3 epsilon or functional fragments of this 27 amino acid stretch. The phrase “context-independent,” as used herein in relation to the CD3 epitope means that binding of the herein described inventive binding molecules/antibody molecules does not lead to a change or modification of the conformation, sequence, or structure surrounding the antigenic determinant or epitope. In contrast, the CD3 epitope recognized by a conventional CD3 binding molecule (e.g. as disclosed in WO 99/54440 or WO 04/106380) is localized on the CD3 epsilon chain C-terminal to the N-terminal 1-27 amino acids of the context-independent epitope, where it only takes the correct conformation if it is embedded within the rest of the epsilon chain and held in the right position by heterodimerization of the epsilon chain with either the CD3 gamma or delta chain.

[0012] Anti-CD3 binding molecules as part of a bispecific binding molecule as provided herein and generated (and directed) against a context-independent CD3 epitope provide for a surprising clinical improvement with regard to T cell redistribution and, thus, a more favourable safety profile. Without being bound by theory, since the CD3 epitope is context-independent, forming an autonomous selfsufficient subdomain without much influence on the rest of the CD3 complex, the CD3 binding molecules provided herein induce less allosteric changes in CD3 conformation than the conventional CD3 binding molecules (like molecules provided in WO 99/54440), which recognize context-dependent CD3 epitopes.

[0013] The context independence of the CD3 epitope of CD3 binding molecules of the invention as part of a bispecific binding molecule is associated with less T cell redistribution during the starting phase of treatment with CD3 binding molecules of the invention resulting in a better safety profile of CD3 binding molecules of the invention compared to conventional CD3 binding molecules known in the art, which recognize context dependent CD3 epitopes. Particularly, because T cell redistribution during the starting phase of treatment with CD3 binding molecules is a major risk factor for CNS adverse events, the CD3 binding molecules of the invention by recognizing a context independent rather than a context dependent CD3 epitope have a substantial safety advantage over the CD3 binding molecules known in the art. Patients with such CNS adverse events related to T cell redistribution during the starting phase of treatment with conventional CD3 binding molecules usually suffer from confusion and disorientation, in some cases also from urinary incontinence. Confusion is a change in mental status in which the patient is not able to think with his or her usual level of clarity. The patient usually has difficulties to concentrate and thinking is not only blurred and unclear but often significantly slowed down. Patients with CNS adverse events related to T cell redistribution during the starting phase of treatment with conventional CD3 binding molecules may also suffer from loss of memory. Frequently, the confusion leads to the loss of ability to recognize people and/or places, or tell time and the date. Feelings of disorientation are common in confusion, and the decision-making ability is impaired. CNS adverse events related to T cell redistribution during the starting phase of treatment with conventional CD3 binding molecules may further comprise blurred speech and/or word finding difficulties. This disorder may impair both, the expression and understanding of language as well as reading and writing. Besides urinary incontinence, also vertigo and dizziness may accompany CNS adverse events related to T cell redistribution during the starting phase of treatment with conventional CD3 binding molecules in some patients.

[0014] The maintenance of the three-dimensional structure within the mentioned 27 amino acid N-terminal polypeptide fragment of CD3 epsilon can be used for the generation of, preferably human, binding domains which bind to the N-terminal CD3 epsilon polypeptide fragment in vitro and to the native (CD3 epsilon subunit of the) CD3 complex on T cells in vivo with the same binding affinity. These data strongly indicate that the N-terminal fragment as described herein forms a tertiary conformation, which is similar to its structure normally existing in vivo. A very sensitive test for the importance of the structural integrity of the amino acid 1-27 of the N-terminal polypeptide fragment of CD3 epsilon was performed. Individual amino acids of amino acids 1-27 of the N-terminal polypeptide fragment of CD3 epsilon were changed to alanine (alanine scanning) to test the sensitivity of the amino acids 1-27 of the N-terminal polypeptide fragment of CD3 epsilon for minor disruptions. CD3 specific antibody molecules as part of a bispecific binding molecule of the invention were used to test for binding to the alanine-mutants of amino acids 1-27 of the N-terminal polypeptide fragment of CD3 epsilon (see appended Example 5). Individual exchanges of the first five amino acid residues at the very N-terminal end of the fragment and two of the amino acids at positions 23 and 25 of the amino acids 1-27 of the N-terminal polypeptide fragment of CD3 epsilon were critical for binding of the antibody molecules. The substitution of amino acid residues in the region of position 1-5 comprising the residues Q (Glutamine at position 1), D (Aspartic acid at position 2), G (Glycine at position 3), N (Asparagine at position 4), and E (Glutamic acid at position 5) to Alanine abolished binding of the, preferably human, binding molecules of the invention to said fragment. While, for at least some of the, preferably human, binding molecules of the invention, two amino acid residues at the C-terminus of the mentioned fragment T (Threonine at position 23) and I (Isoleucine at position 25) reduced the binding energy to the, preferably human, binding molecules of the invention.

[0015] Unexpectedly, it has been found that the thus isolated, preferably human, binding molecules not only recognize the human N-terminal fragment of CD3 epsilon, but also the corresponding homologous fragments of CD3 epsilon of various primates, including New-World Monkeys (Marmoset, Callithrix jacchus; Saguinus oedipus; Saimiri sciureus) and Old-World Monkeys (Macaca fascicularis, also known as Cynomolgus Monkey; or Macaca mulatta, also known as Rhesus Monkey). Thus, multi-primate specificity of the CD3-binding molecules of the invention was detected. The following sequence analyses confirmed that human and primates share a highly homologous sequence stretch at the N-terminus of the extracellular domain of CD3 epsilon.

[0016] It has been found in the present invention that it is possible to generate, preferably human, binding molecules specific for CD3 epsilon wherein the identical molecule can be used in preclinical animal testing, as well as clinical studies and even in therapy in human. This is due to the unexpected identification of, preferably human, binding molecules, which, in addition to binding to human CD3 epsilon (and due to genetic similarity likely to the chimpanzee counterpart), also bind to the homologs of said antigens of non-chimpanzee primates, including New-World Monkeys and Old-World Monkeys. As shown in the following Examples, said CD3 epsilon specific, preferably human, binding molecules can be integrated into bispecific single chain antibodies in order to generate therapeutics against various diseases, including but not limited to cancer or immunological disorders. Thus, the need to construct a surrogate CD3 epsilon binding domain or a bispecific single chain antibody including the same for testing in a phylogenetic distant (from humans) species disappears. As a result, the very same molecule can be used in animal preclinical testing as is intended to be administered to humans in clinical testing as well as following market approval and therapeutic drug administration. The ability to use the same molecule for preclinical animal testing as in later administration to humans virtually eliminates, or at least greatly reduces, the danger that the data obtained in preclinical animal testing have limited applicability to the human case. In short, obtaining preclinical safety data in animals using the same molecule as will actually be administered to humans does much to ensure the applicability of the data to a human-relevant scenario. In contrast, in conventional approaches using surrogate molecules, said surrogate molecules have to be molecularly adapted to the animal test system used for preclinical safety assessment. Thus, the molecule to be used in human therapy in fact differs in sequence and also likely in structure from the surrogate molecule used in preclinical testing in pharmacokinetic parameters and/or biological activity, with the consequence that data obtained in preclinical animal testing have limited applicability/transferability to the human case. The use of surrogate molecules requires the construction, production, purification and characterization of a completely new construct. This leads to additional development costs and time necessary to obtain that molecule. In sum, surrogates have to be developed separately in addition to the actual drug to be used in human therapy, so that two lines of development for two molecules have to be carried out. Therefore, a major advantage of the human binding molecule or a antibody-based constructs exhibiting cross-species specificity described herein is that the identical molecule can be used for therapeutics in humans and in preclinical animal testing.

[0017] It is preferred for polypeptide of the invention that the first binding domain capable of binding to an epitope of the human and non-chimpanzee primate CD3 epsilon chain is of human origin.

[0018] In addition, due to the human origin of the human binding molecules of the invention the generation of an immune reaction against said binding molecules is excluded to the maximum possible extent upon administration of the binding molecules to human patients.

[0019] Another major advantage of the, preferably human, CD3 epsilon specific human binding molecules as part of a bispecific binding molecule of the invention is their applicability for preclinical testing in various primates. The behavior of a drug candidate in animals should ideally be indicative of the expected behavior of this drug candidate upon administration to humans. As a result, the data obtained from such preclinical testing should therefore generally have a high predictive power for the human case. However, as learned from the tragic outcome of the recent Phase I clinical trial on TGN1412 (a CD28 monoclonal antibody), a drug candidate may act differently in a primate species than in humans: Whereas in preclinical testing of said antibody no or only limited adverse effects have been observed in animal studies performed with cynomolgus monkeys, six human patients developed multiple organ failure upon administration of said antibody (Lancet 368 (2006), 2206-7). The results of these not-desired negative events suggest that it may not be sufficient to limit preclinical testing to only one (primate) species. The fact that the CD3 epsilon specific human binding molecules of the invention bind to a series of New-World and Old-World Monkeys may help to overcome the problems faced in the case mentioned above. Accordingly, the present invention provides means and methods for minimizing species differences in effects when drugs for human therapy are being developed and tested.

[0020] With the, preferably human, cross-species specific CD3 epsilon binding domain as part of a bispecific binding molecule of the invention it is also no longer necessary to adapt the test animal to the drug candidate intended for administration to humans, such as e.g. the creation of transgenic animals. The CD3 epsilon specific, preferably human, binding molecules (or bispecific single chain antibodies containing the same), exhibiting cross-species specificity according to the uses and the methods of invention can be directly used for preclinical testing in non-chimpanzee primates, without any genetic manipulation of the animals. As well known to those skilled in the art, approaches in which the test animal is adapted to the drug candidate always bear the risk that the results obtained in the preclinical safety testing are less representative and predictive for humans due to the modification of the animal. For example, in transgenic animals, the proteins encoded by the transgenes are often highly over-expressed. Thus, data obtained for the biological activity of an antibody against this protein antigen may be limited in their predictive value for humans in which the protein is expressed at much lower, more physiological levels.

[0021] A further advantage of the uses of the CD3 epsilon specific, preferably human, binding molecules (or bispecific single chain antibodies containing the same) exhibiting cross-species specificity is the fact that chimpanzees as an endangered species are avoided for animal testing. Chimpanzees are the closest relatives to humans and were recently grouped into the family of hominids based on the genome sequencing data (Wildman et al., PNAS 100 (2003), 7181). Therefore, data obtained with chimpanzee is generally considered to be highly predictive for humans. However, due to their status as endangered species, the number of chimpanzees, which can be used for medical experiments, is highly restricted. As stated above, maintenance of chimpanzees for animal testing is therefore both costly and ethically problematic. The uses of CD3 epsilon specific, preferably human, binding molecules of the invention (or bispecific single chain antibodies containing the same) avoids both ethical objections and financial burden during preclinical testing without prejudicing the quality, i.e. applicability, of the animal testing data obtained. In light of this, the uses of CD3 epsilon specific, preferably human, binding molecules (or bispecific single chain antibodies containing the same) provides for a reasonable alternative for studies in chimpanzees.

[0022] A further advantage of the CD3 epsilon specific, preferably human, binding molecules of the invention (or bispecific single chain antibodies containing the same) is the ability of extracting multiple blood samples when using it as part of animal preclinical testing, for example in the course of pharmacokinetic animal studies. Multiple blood extractions can be much more readily obtained with a non-chimpanzee primate than with lower animals, e.g. a mouse. The extraction of multiple blood samples allows continuous testing of blood parameters for the determination of the biological effects induced by the, preferably human, binding molecule (or bispecific single chain antibody) of the invention. Furthermore, the extraction of multiple blood samples enables the researcher to evaluate the pharmacokinetic profile of the, preferably human, binding molecule (or bispecific single chain antibody) as defined herein. In addition, potential side effects, which may be induced by said, preferably human, binding molecule (or bispecific single chain antibody) reflected in blood parameters can be measured in different blood samples extracted during the course of the administration of said antibody. This allows the determination of the potential toxicity profile of the, preferably human, binding molecule (or bispecific single chain antibody) as defined herein.

[0023] The advantages of the, preferably human, binding molecules (or bispecific single chain antibodies) as defined herein exhibiting cross-species specificity may be briefly summarized as follows:

[0024] First, the, preferably human, binding molecules (or bispecific single chain antibodies) as defined herein used in preclinical testing is the same as the one used in human therapy. Thus, it is no longer necessary to develop two independent molecules, which may differ in their pharmacokinetic properties and biological activity. This is highly advantageous in that e.g. the pharmacokinetic results are more directly transferable and applicable to the human setting than e.g. in conventional surrogate approaches.

[0025] Second, the uses of the, preferably human, binding molecules (or bispecific single chain antibodies) as defined herein for the preparation of therapeutics in human is less cost- and labor-intensive than surrogate approaches.

[0026] Third, the, preferably human, binding molecules (or bispecific single chain antibodies) as defined herein can be used for preclinical testing not only in one primate species, but in a series of different primate species, thereby limiting the risk of potential species differences between primates and human.

[0027] Fourth, chimpanzee as an endangered species for animal testing is avoided.

[0028] Fifth, multiple blood samples can be extracted for extensive pharmacokinetic studies.

[0029] Sixth, due to the human origin of the, preferably human, binding molecules according to a preferred embodiment of the invention the generation of an immune reaction against said binding molecules is minimalized when administered to human patients. Induction of an immune response with antibodies specific for a drug candidate derived from a non-human species as e.g. a mouse leading to the development of human-anti-human antibodies (HAMAs) against therapeutic molecules of murine origin is excluded.

[0030] The term “protein” is well known in the art and describes biological compounds. Proteins comprise one or more amino acid chains (polypeptides), whereby the amino acids are bound among one another via a peptide bond. The term “polypeptide” as used herein describes a group of molecules, which consist of more than 30 amino acids. In accordance with the invention, the group of polypeptides comprises “proteins” as long as the proteins consist of a single polypeptide. Also in line with the definition the term “polypeptide” describes fragments of proteins as long as these fragments consist of more than 30 amino acids. Polypeptides may further form multimers such as dimers, trimers and higher oligomers, i.e. consisting of more than one polypeptide molecule. Polypeptide molecules forming such dimers, trimers etc. may be identical or non-identical. The corresponding higher order structures of such multimers are, consequently, termed homo- or heterodimers, homo- or heterotrimers etc. An example for a hereteromultimer is an antibody molecule, which, in its naturally occurring form, consists of two identical light polypeptide chains and two identical heavy polypeptide chains. The terms “polypeptide” and “protein” also refer to naturally modified polypeptides/proteins wherein the modification is effected e.g. by post-translational modifications like glycosylation, acetylation, phosphorylation and the like. Such modifications are well known in the art.

[0031] As used herein, “human” and “man” refers to the species Homo sapiens. As far as the medical uses of the constructs described herein are concerned, human patients are to be treated with the same molecule.

[0032] The term “human origin” as used in the context with the molecules of the invention describes molecules derivable from human libraries or having a structure/sequence corresponding to the human equivalent. Accordingly, proteins having an amino acid sequence corresponding to the analog human sequence, e.g. an antibody fragment having an amino acid sequences in the framework corresponding to the human germ line sequences, are understood as molecules of human origin.

[0033] As used herein, a “non-chimpanzee primate” or “non-chimp primate” or grammatical variants thereof refers to any primate other than chimpanzee, i.e. other than an animal of belonging to the genus Pan, and including the species Pan paniscus and Pan troglodytes, also known as Anthropopithecus troglodytes or Simia satyrus. A “primate”, “primate species”, “primates” or grammatical variants thereof denote/s an order of eutherian mammals divided into the two suborders of prosimians and anthropoids and comprising man, apes, monkeys and lemurs. Specifically, “primates” as used herein comprises the suborder Strepsirrhini (non-tarsier prosimians), including the infraorder Lemuriformes (itself including the superfamilies Cheirogaleoidea and Lemuroidea), the infraorder Chiromyiformes (itself including the family Daubentoniidae) and the infraorder Lorisiformes (itself including the families Lorisidae and Galagidae). “Primates” as used herein also comprises the suborder Haplorrhini, including the infraorder Tarsiiformes (itself including the family Tarsiidae), the infraorder Simiiformes (itself including the Platyrrhini, or New-World monkeys, and the Catarrhini, including the Cercopithecidea, or Old-World Monkeys).

[0034] The non-chimpanzee primate species may be understood within the meaning of the invention to be a lemur, a tarsier, a gibbon, a marmoset (belonging to New-World Monkeys of the family Cebidae) or an Old-World Monkey (belonging to the superfamily Cercopithecoidea).

[0035] As used herein, an “Old-World Monkey” comprises any monkey falling in the superfamily Cercopithecoidea, itself subdivided into the families: the Cercopithecinae, which are mainly African but include the diverse genus of macaques which are Asian and North African; and the Colobinae, which include most of the Asian genera but also the African colobus monkeys.

[0036] Specifically, within the subfamily Cercopithecinae, an advantageous non-chimpanzee primate may be from the Tribe Cercopithecini, within the genus Allenopithecus(Allen's Swamp Monkey, Allenopithecus nigroviridis); within the genus Miopithecus(Angolan Talapoin, Miopithecus talapoin; Gabon Talapoin, Miopithecus ogouensis); within the genus Erythrocebus (Patas Monkey, Erythrocebus patas); within the genus Chlorocebus (Green Monkey, Chlorocebus sabaceus; Grivet, Chlorocebus aethiops; Bale Mountains Vervet, Chlorocebus djamdjamensis; Tantalus Monkey, Chlorocebus tantalus; Vervet Monkey, Chlorocebus pygerythrus; Malbrouck, Chlorocebus cynosuros); or within the genus Cercopithecus (Dryas Monkey or Salongo Monkey, Cercopithecus dryas; Diana Monkey, Cercopithecus diana; Roloway Monkey, Cercopithecus roloway; Greater Spot-nosed Monkey, Cercopithecus nictitans; Blue Monkey, Cercopithecus mitis; Silver Monkey, Cercopithecus doggetti; Golden Monkey, Cercopithecus kandti; Sykes's Monkey, Cercopithecus albogularis; Mona Monkey, Cercopithecus mona; Campbell's Mona Monkey, Cercopithecus campbelli; Lowe's Mona Monkey, Cercopithecus lowei; Crested Mona Monkey, Cercopithecus pogonias; Wolf's Mona Monkey, Cercopithecus wolfi; Dent's Mona Monkey, Cercopithecus denti; Lesser Spot-nosed Monkey, Cercopithecus petaurista; White-throated Guenon, Cercopithecus erythrogaster; Sclater's Guenon, Cercopithecus sclateri; Red-eared Guenon, Cercopithecus erythrotis; Moustached Guenon, Cercopithecus cephus; Red-tailed Monkey, Cercopithecus ascanius; L'Hoest's Monkey, Cercopithecus lhoesti; Preuss's Monkey, Cercopithecus preussi; Sun-tailed Monkey, Cercopithecus solatus; Hamlyn's Monkey or Owl-faced Monkey, Cercopithecus hamlyni; De Brazza's Monkey, Cercopithecus neglectus).

[0037] Alternatively, an advantageous non-chimpanzee primate, also within the subfamily Cercopithecinae but within the Tribe Papionini, may be from within the genus Macaca (Barbary Macaque, Macaca sylvanus; Lion-tailed Macaque, Macaca silenus; Southern Pig-tailed Macaque or Beruk, Macaca nemestrina; Northern Pig-tailed Macaque, Macaca leonina; Pagai Island Macaque or Bokkoi, Macaca pagensis; Siberut Macaque, Macaca siberu; Moor Macaque, Macaca maura; Booted Macaque, Macaca ochreata; Tonkean Macaque, Macaca tonkeana; Heck's Macaque, Macaca hecki; Gorontalo Macaque, Macaca nigriscens; Celebes Crested Macaque or Black “Ape”, Macaca nigra; Cynomolgus monkey or Crab-eating Macaque or Long-tailed Macaque or Kera, Macaca fascicularis; Stump-tailed Macaque or Bear Macaque, Macaca arctoides; Rhesus Macaque, Macaca mulatta; Formosan Rock Macaque, Macaca cyclopis; Japanese Macaque, Macaca fuscata; Toque Macaque, Macaca sinica; Bonnet Macaque, Macaca radiata; Barbary Macaque, Macaca sylvanmus; Assam Macaque, Macaca assamensis; Tibetan Macaque or Milne-Edwards' Macaque, Macaca thibetana; Arunachal Macaque or Munzala, Macaca munzala); within the genus Lophocebus (Gray-cheeked Mangabey, Lophocebus albigena; Lophocebus albigena albigena; Lophocebus albigena osmani; Lophocebus albigena johnstoni; Black Crested Mangabey, Lophocebus aterrimus; Opdenbosch's Mangabey, Lophocebus opdenboschi; Highland Mangabey, Lophocebus kipunji); within the genus Papio (Hamadryas Baboon, Papio hamadryas; Guinea Baboon, Papio papio; Olive Baboon, Papio anubis; Yellow Baboon, Papio cynocephalus; Chacma Baboon, Papio ursinus); within the genus Theropithecus (Gelada, Theropithecus gelada); within the genus Cercocebus (Sooty Mangabey, Cercocebus atys; Cercocebus atys atys; Cercocebus atys lunulatus; Collared Mangabey, Cercocebus torquatus; Agile Mangabey, Cercocebus agilis; Golden-bellied Mangabey, Cercocebus chrysogaster; Tana River Mangabey, Cercocebus galeritus; Sanje Mangabey, Cercocebus sanjei); or within the genus Mandrillus (Mandrill, Mandrillus sphinx; Drill, Mandrillus leucophaeus).

[0038] Most preferred is Macaca fascicularis (also known as Cynomolgus monkey and, therefore, in the Examples named “Cynomolgus”) and Macaca mulatta (rhesus monkey, named “rhesus”).

[0039] Within the subfamily Colobinae, an advantageous non-chimpanzee primate may be from the African group, within the genus Colobus (Black Colobus, Colobus satanas; Angola Colobus, Colobus angolensis; King Colobus, Colobus polykomos; Ursine Colobus, Colobus vellerosus; Mantled Guereza, Colobus guereza); within the genus Piliocolobus (Western Red Colobus, Piliocolobus badius; Piliocolobus badius badius; Piliocolobus badius temminckii; Piliocolobus badius waldronae; Pennant's Colobus, Piliocolobus pennantii; Piliocolobus pennantii pennantii; Piliocolobus pennantii epieni; Piliocolobus pennantii bouvieri; Preuss's Red Colobus, Piliocolobus preussi; Thollon's Red Colobus, Piliocolobus tholloni; Central African Red Colobus, Piliocolobus foai; Piliocolobus foai foal; Piliocolobus foai ellioti; Piliocolobus foai oustaleti; Piliocolobus foai semlikiensis; Piliocolobus foai parmentierorum; Ugandan Red Colobus, Piliocolobus tephrosceles; Uzyngwa Red Colobus, Piliocolobus gordonorum; Zanzibar Red Colobus, Piliocolobus kirkii; Tana River Red Colobus, Piliocolobus rufomitratus); or within the genus Procolobus (Olive Colobus, Procolobus verus).

[0040] Within the subfamily Colobinae, an advantageous non-chimpanzee primate may alternatively be from the Langur (leaf monkey) group, within the genus Semnopithecus (Nepal Gray Langur, Semnopithecus schistaceus; Kashmir Gray Langur, Semnopithecus ajax; Tarai Gray Langur, Semnopithecus hector; Northern Plains Gray Langur, Semnopithecus entellus; Black-footed Gray Langur, Semnopithecus hypoleucos; Southern Plains Gray Langur, Semnopithecus dussumieri; Tufted Gray Langur, Semnopithecus priam); within the T. vetulus group or the genus Trachypithecus (Purple-faced Langur, Trachypithecus vetulus; Nilgiri Langur, Trachypithecus johnii); within the T. cristatus group of the genus Trachypithecus (Javan Lutung, Trachypithecus auratus; Silvery Leaf Monkey or Silvery Lutung, Trachypithecus cristatus; Indochinese Lutung, Trachypithecus germaini; Tenasserim Lutung, Trachypithecus barbei); within the T. obscurus group of the genus Trachypithecus (Dusky Leaf Monkey or Spectacled Leaf Monkey, Trachypithecus obscurus; Phayre's Leaf Monkey, Trachypithecus phayrei); within the T. pileatus group of the genus Trachypithecus (Capped Langur, Trachypithecus pileatus; Shortridge's Langur, Trachypithecus shortridgei; Gee's Golden Langur, Trachypithecus geei); within the T. francoisi group of the genus Trachypithecus(Francois' Langur, Trachypithecus francoisi; Hatinh Langur, Trachypithecus hatinhensis; White-headed Langur, Trachypithecus poliocephalus; Laotian Langur, Trachypithecus laotum; Delacour's Langur, Trachypithecus delacouri; Indochinese Black Langur, Trachypithecus ebenus); or within the genus Presbytis (Sumatran Surili, Presbytis melalophos; Banded Surili, Presbytis femoralis; Sarawak Surili, Presbytis chrysomelas; White-thighed Surili, Presbytis siamensis; White-fronted Surili, Presbytis frontata; Javan Surili, Presbytis comata; Thomas's Langur, Presbytis thomasi; Hose's Langur, Presbytis hosei; Maroon Leaf Monkey, Presbytis rubicunda; Mentawai Langur or Joja, Presbytis potenziani; Natuna Island Surili, Presbytis natunae).

[0041] Within the subfamily Colobinae, an advantageous non-chimpanzee primate may alternatively be from the Odd-Nosed group, within the genus Pygathrix (Red-shanked Douc, Pygathrix nemaeus; Black-shanked Douc, Pygathrix nigripes; Gray-shanked Douc, Pygathrix cinerea); within the genus Rhinopithecus (Golden Snub-nosed Monkey, Rhinopithecus roxellana; Black Snub-nosed Monkey, Rhinopithecus bieti; Gray Snub-nosed Monkey, Rhinopithecus brelichi; Tonkin Snub-nosed Langur, Rhinopithecus avunculus); within the genus Nasalis (Proboscis Monkey, Nasalis larvatus); or within the genus Simias (Pig-tailed Langur, Simias concolor).

[0042] As used herein, the term “marmoset” denotes any New-World Monkeys of the genus Callithrix, for example belonging to the Atlantic marmosets of subgenus Callithrix(sic!) (Common Marmoset, Callithrix (Callithrix) jacchus; Black-tufted Marmoset, Callithrix (Callithrix) penicillata; Wied's Marmoset, Callithrix (Callithrix) kuhlii; White-headed Marmoset, Callithrix (Callithrix) geoffroyi; Buffy-headed Marmoset, Callithrix (Callithrix) flaviceps; Buffy-tufted Marmoset, Callithrix (Callithrix) aurita); belonging to the Amazonian marmosets of subgenus Mico (Rio Acari Marmoset, Callithrix (Mico) acariensis; Manicore Marmoset, Callithrix (Mico) manicorensis; Silvery Marmoset, Callithrix (Mico) argentata; White Marmoset, Callithrix (Mico) leucippe; Emilia's Marmoset, Callithrix (Mico) emiliae; Black-headed Marmoset, Callithrix (Mico) nigriceps; Marca's Marmoset, Callithrix (Mico) marcai; Black-tailed Marmoset, Callithrix (Mico) melanura; Santarem Marmoset, Callithrix (Mico) humeralifera; Maués Marmoset, Callithrix (Mico) mauesi; Gold-and-white Marmoset, Callithrix (Mico) chrysoleuca; Hershkovitz's Marmoset, Callithrix (Mico) intermedia; Satéré Marmoset, Callithrix (Mico) saterei); Roosmalens' Dwarf Marmoset belonging to the subgenus Callibella (Callithrix (Callibella) humilis); or the Pygmy Marmoset belonging to the subgenus Cebuella (Callithrix (Cebuella) pygmaea).

[0043] Other genera of the New-World Monkeys comprise tamarins of the genus Saguinus(comprising the S. oedipus-group, the S. midas group, the S. nigricollis group, the S. mystax group, the S. bicolor group and the S. inustus group) and squirrel monkeys of the genus Samiri (e.g. Saimiri sciureus, Saimiri oerstedii, Saimiri ustus, Saimiri boliviensis, Saimiri vanzolini)

[0044] The term “binding domain” characterizes in connection with the present invention a domain of a polypeptide which specifically binds/interacts with a given target structure/antigen/epitope. Thus, the binding domain is an “antigen-interaction-site”. The term “antigen-interaction-site” defines, in accordance with the present invention, a motif of a polypeptide, which is able to specifically interact with a specific antigen or a specific group of antigens, e.g. the identical antigen in different species. Said binding/interaction is also understood to define a “specific recognition”. The term “specifically recognizing” means in accordance with this invention that the antibody molecule is capable of specifically interacting with and/or binding to at least two, preferably at least three, more preferably at least four amino acids of an antigen, e.g. the human CD3 antigen as defined herein. Such binding may be exemplified by the specificity of a “lock-and-key-principle”. Thus, specific motifs in the amino acid sequence of the binding domain and the antigen bind to each other as a result of their primary, secondary or tertiary structure as well as the result of secondary modifications of said structure. The specific interaction of the antigen-interaction-site with its specific antigen may result as well in a simple binding of said site to the antigen. Moreover, the specific interaction of the antigen-interaction-site with its specific antigen may alternatively result in the initiation of a signal, e.g. due to the induction of a change of the conformation of the antigen, an oligomerization of the antigen, etc. A preferred example of a binding domain in line with the present invention is an antibody. The binding domain may be a monoclonal or polyclonal antibody or derived from a monoclonal or polyclonal antibody.

[0045] The term “antibody” comprises derivatives or functional fragments thereof which still retain the binding specificity. Techniques for the production of antibodies are well known in the art and described, e.g. in Harlow and Lane “Antibodies, A Laboratory Manual”, Cold Spring Harbor Laboratory Press, 1988 and Harlow and Lane “Using Antibodies: A Laboratory Manual” Cold Spring Harbor Laboratory Press, 1999. The term “antibody” also comprises immunoglobulins (Ig's) of different classes (i.e. IgA, IgG, IgM, IgD and IgE) and subclasses (such as IgG1, IgG2 etc.). These antibodies can be used, for example, for the immunoprecipitation, affinity purification and immunolocalization of the polypeptides or fusion proteins of the invention as well as for the monitoring of the presence and amount of such polypeptides, for example, in cultures of recombinant prokaryotes or eukaryotic cells or organisms.

[0046] The definition of the term “antibody” also includes embodiments such as chimeric, single chain and humanized antibodies, as well as antibody fragments, like, inter alia, Fab fragments. Antibody fragments or derivatives further comprise F(ab′)₂, Fv, scFv fragments or single domain antibodies, single variable domain antibodies or immunoglobulin single variable domain comprising merely one variable domain, which might be VH or VL, that specifically bind an antigen or epitope independently of other V regions or domains; see, for example, Harlow and Lane (1988) and (1999), loc. cit. Such immunoglobulin single variable domain encompasses not only an isolated antibody single variable domain polypeptide, but also larger polypeptides that comprise one or more monomers of an antibody single variable domain polypeptide sequence.

[0047] Various procedures are known in the art and may be used for the production of such antibodies and/or fragments. Thus, the (antibody) derivatives can be produced by peptidomimetics. Further, techniques described for the production of single chain antibodies (see, inter alia, U.S. Pat. No. 4,946,778) can be adapted to produce single chain antibodies specific for elected polypeptide(s). Also, transgenic animals may be used to express humanized antibodies specific for polypeptides and fusion proteins of this invention. For the preparation of monoclonal antibodies, any technique, providing antibodies produced by continuous cell line cultures can be used. Examples for such techniques include the hybridoma technique (Köhler and Milstein Nature 256 (1975), 495-497), the trioma technique, the human B-cell hybridoma technique (Kozbor, Immunology Today 4 (1983), 72) and the EBV-hybridoma technique to produce human monoclonal antibodies (Cole et al., Monoclonal Antibodies and Cancer Therapy, Alan R. Liss, Inc. (1985), 77-96). Surface plasmon resonance as employed in the BIAcore system can be used to increase the efficiency of phage antibodies which bind to an epitope of a target polypeptide, such as CD3 epsilon (Schier, Human Antibodies Hybridomas 7 (1996), 97-105; Malmborg, J. Immunol. Methods 183 (1995), 7-13). It is also envisaged in the context of this invention that the term “antibody” comprises antibody constructs, which may be expressed in a host as described herein below, e.g. antibody constructs which may be transfected and/or transduced via, inter alia, viruses or plasmid vectors.

[0048] The term “specific interaction” as used in accordance with the present invention means that the binding (domain) molecule does not or does not significantly cross-react with polypeptides which have similar structure as those bound by the binding molecule, and which might be expressed by the same cells as the polypeptide of interest. Cross-reactivity of a panel of binding molecules under investigation may be tested, for example, by assessing binding of said panel of binding molecules under conventional conditions (see, e.g., Harlow and Lane, Antibodies: A Laboratory Manual, Cold Spring Harbor Laboratory Press, 1988 and Using Antibodies: A Laboratory Manual, Cold Spring Harbor Laboratory Press, 1999). Examples for the specific interaction of a binding domain with a specific antigen comprise the specificity of a ligand for its receptor. Said definition particularly comprises the interaction of ligands, which induce a signal upon binding to its specific receptor. Examples for said interaction, which is also particularly comprised by said definition, is the interaction of an antigenic determinant (epitope) with the binding domain (antigenic binding site) of an antibody.

[0049] The term “cross-species specificity” or “interspecies specificity” as used herein means binding of a binding domain described herein to the same target molecule in humans and non-chimpanzee primates. Thus, “cross-species specificity” or “interspecies specificity” is to be understood as an interspecies reactivity to the same molecule X expressed in different species, but not to a molecule other than X. Cross-species specificity of a monoclonal antibody recognizing e.g. human CD3 epsilon, to a non-chimpanzee primate CD3 epsilon, e.g. macaque CD3 epsilon, can be determined, for instance, by FACS analysis. The FACS analysis is carried out in a way that the respective monoclonal antibody is tested for binding to human and non-chimpanzee primate cells, e.g. macaque cells, expressing said human and non-chimpanzee primate CD3 epsilon antigens, respectively. An appropriate assay is shown in the following examples.

[0050] As used herein, CD3 epsilon denotes a molecule expressed as part of the T cell receptor and has the meaning as typically ascribed to it in the prior art. In human, it encompasses in individual or independently combined form all known CD3 subunits, for example CD3 epsilon, CD3 delta, CD3 gamma, CD3 zeta, CD3 alpha and CD3 beta. The non-chimpanzee primate CD3 antigens as referred to herein are, for example, Macaca fascicularis CD3 and Macaca mulatta CD3. In Macaca fascicularis, it encompasses CD3 epsilon FN-18 negative and CD3 epsilon FN-18 positive, CD3 gamma and CD3 delta. In Macaca mulatta, it encompasses CD3 epsilon, CD3 gamma and CD3 delta. Preferably, said CD3 as used herein is CD3 epsilon. The human CD3 epsilon is indicated in GenBank Accession No. NM_000733 and comprises SEQ ID NO. 1. The human CD3 gamma is indicated in GenBank Accession NO. NM_000073. The human CD3 delta is indicated in GenBank Accession No. NM_000732.

[0051] The CD3 epsilon “FN-18 negative” of Macaca fascicularis (i.e. CD3 epsilon not recognized by monoclonal antibody FN-18 due to a polymorphism as set forth above) is indicated in GenBank Accession No. AB073994.

[0052] The CD3 epsilon “FN-18 positive” of Macaca fascicularis (i.e. CD3 epsilon recognized by monoclonal antibody FN-18) is indicated in GenBank Accession No. AB073993. The CD3 gamma of Macaca fascicularis is indicated in GenBank Accession No. AB073992. The CD3 delta of Macaca fascicularis is indicated in GenBank Accession No. AB073991.

[0053] The nucleic acid sequences and amino acid sequences of the respective CD3 epsilon, gamma and delta homologs of Macaca mulatta can be identified and isolated by recombinant techniques described in the art (Sambrook et al. Molecular Cloning: A Laboratory Manual; Cold Spring Harbor Laboratory Press, 3^{rd} edition 2001). This applies mutatis mutandis to the CD3 epsilon, gamma and delta homologs of other non-chimpanzee primates as defined herein. The identification of the amino acid sequence of Callithrix jacchus, Saimiri sciureus and Saguinus oedipus is described in the appended examples. The amino acid sequence of the extracellular domain of the CD3 epsilon of Callithrix jacchus is depicted in SEQ ID NO: 3, the one of Saguinus oedipus is depicted in SEQ ID NO: 5 and the one of Saimiri sciureus is depicted in SEQ ID NO: 7.

[0054] In line with the above the term “epitope” defines an antigenic determinant, which is specifically bound/identified by a binding molecule as defined above. The binding domain or molecules may specifically bind to/interact with conformational or continuous epitopes, which are unique for the target structure, e.g. the human and non-chimpanzee primate CD3 epsilon chain. A conformational or discontinuous epitope is characterized for polypeptide antigens by the presence of two or more discrete amino acid residues which are separated in the primary sequence, but come together on the surface of the molecule when the polypeptide folds into the native protein/antigen (Sela, (1969) Science 166, 1365 and Laver, (1990) Cell 61, 553-6). The two or more discrete amino acid residues contributing to the epitope are present on separate sections of one or more polypeptide chain(s). These residues come together on the surface of the molecule when the polypeptide chain(s) fold(s) into a three-dimensional structure to constitute the epitope. In contrast, a continuous or linear epitope consists of two or more discrete amino acid residues, which are present in a single linear segment of a polypeptide chain. Within the present invention, a “context-dependent” CD3 epitope refers to the conformation of said epitope. Such a context-dependent epitope, localized on the epsilon chain of CD3, can only develop its correct conformation if it is embedded within the rest of the epsilon chain and held in the right position by heterodimerization of the epsilon chain with either CD3 gamma or delta chain. In contrast, a context-independent CD3 epitope as provided herein refers to an N-terminal 1-27 amino acid residue polypeptide or a functional fragment thereof of CD3 epsilon. This N-terminal 1-27 amino acid residue polypeptide or a functional fragment thereof maintains its three-dimensional structural integrity and correct conformation when taken out of its native environment in the CD3 complex. The context-independency of the N-terminal 1-27 amino acid residue polypeptide or a functional fragment thereof, which is part of the extracellular domain of CD3 epsilon, represents, thus, an epitope which is completely different to the epitopes of CD3 epsilon described in connection with a method for the preparation of human binding molecules in WO 2004/106380. Said method used solely expressed recombinant CD3 epsilon. The conformation of this solely expressed recombinant CD3 epsilon differed from that adopted in its natural form, that is, the form in which the CD3-epsilon subunit of the TCR/CD3 complex exists as part of a noncovalent complex with either the CD3-delta or the CD3-gamma subunit of the TCR/CD3 complex. When such solely expressed recombinant CD3-epsilon protein is used as an antigen for selection of antibodies from an antibody library, antibodies specific for this antigen are identified from the library although such a library does not contain antibodies with specificity for self-antigens/autoantigens. This is due to the fact that solely expressed recombinant CD3-epsilon protein does not exist in vivo; it is not an autoantigen. Consequently, subpopulations of B cells expressing antibodies specific for this protein have not been depleted in vivo; an antibody library constructed from such B cells would contain genetic material for antibodies specific for solely expressed recombinant CD3-epsilon protein.

[0055] However, since the context-independent N-terminal 1-27 amino acid residue polypeptide or a functional fragment thereof is an epitope, which folds in its native form, binding domains in line with the present invention cannot be identified by methods based on the approach described in WO 04/106380. Therefore, it could be verified in tests that binding molecules as disclosed in WO 04/106380 are not capable of binding to the N-terminal 1-27 amino acid residues of the CD3 epsilon chain. Hence, conventional anti-CD3 binding molecules or anti-CD3 antibody molecules (e.g. as disclosed in WO 99/54440) bind CD3 epsilon chain at a position which is more C-terminally located than the context-independent N-terminal 1-27 amino acid residue polypeptide or a functional fragment provided herein. Prior art antibody molecules OKT3 and UCHT-1 have also a specificity for the epsilon-subunit of the TCR/CD3 complex between amino acid residues 35 to 85 and, accordingly, the epitope of these antibodies is also more C-terminally located. In addition, UCHT-1 binds to the CD3 epsilon chain in a region between amino acid residues 43 to 77 (Tunnacliffe, Int. Immunol. 1 (1989), 546-50; Kjer-Nielsen, PNAS 101, (2004), 7675-7680; Salmeron, J. Immunol. 147 (1991), 3047-52). Therefore, prior art anti-CD3 molecules do not bind to and are not directed against the herein defined context-independent N-terminal 1-27 amino acid residue epitope (or a functional fragment thereof).

[0056] For the generation of a, preferably human, binding domain comprised in a polypeptide of the invention, e.g. in a bispecific single chain antibody as defined herein, e.g. monoclonal antibodies binding to both the human and non-chimpanzee primate CD3 epsilon (e.g. macaque CD3 epsilon) can be used.

[0057] In a preferred embodiment of the polypeptide of the invention, the non-chimpanzee primate is an old world monkey. In a more preferred embodiment of the polypeptide, the old world monkey is a monkey of the Papio genus Macaque genus. Most preferably, the monkey of the Macaque genus is Assamese macaque (Macaca assamensis), Barbary macaque (Macaca sylvanus), Bonnet macaque (Macaca radiata), Booted or Sulawesi-Booted macaque (Macaca ochreata), Sulawesi-crested macaque (Macaca nigra), Formosan rock macaque (Macaca cyclopsis), Japanese snow macaque or Japanese macaque (Macaca fuscata), Cynomologus monkey or crab-eating macaque or long-tailed macaque or Java macaque (Macaca fascicularis), Lion-tailed macaque (Macaca silenus), Pigtailed macaque (Macaca nemestrina), Rhesus macaque (Macaca mulatta), Tibetan macaque (Macaca thibetana), Tonkean macaque (Macaca tonkeana), Toque macaque (Macaca sinica), Stump-tailed macaque or Red-faced macaque or Bear monkey (Macaca arctoides), or Moor macaque (Macaca maurus). Most preferably, the monkey of the Papio genus is Hamadryas Baboon, Papio hamadryas; Guinea Baboon, Papio papio; Olive Baboon, Papio anubis; Yellow Baboon, Papio cynocephalus; Chacma Baboon, Papio ursinus

[0058] In an alternatively preferred embodiment of the polypeptide of the invention, the non-chimpanzee primate is a new world monkey. In a more preferred embodiment of the polypeptide, the new world monkey is a monkey of the Callithrix genus (marmoset), the Saguinus genus or the Samiri genus. Most preferably, the monkey of the Callithrix genus is Callithrix jacchus, the monkey of the Saguinus genus is Saguinus oedipus and the monkey of the Samiri genus is Saimiri sciureus.

[0059] As described herein above the polypeptide of the invention binds with the first binding domain to an epitope of human and non-chimpanzee primate CD3ε (epsilon) chain, wherein the epitope is part of an amino acid sequence comprised in the group consisting of 27 amino acid residues as depicted in SEQ ID NOs. 2, 4, 6, or 8.

[0060] In line with the present invention it is preferred for the polypeptide of the invention that said epitope is part of an amino acid sequence comprising 26, 25, 24, 23, 22, 21, 20, 19, 18, 17, 16, 15, 14, 13, 12, 11, 10, 9, 8, 7, 6 or 5 amino acids.

[0061] More preferably, wherein said epitope comprises at least the amino acid sequence Gln-Asp-Gly-Asn-Glu (Q-D-G-N-E-D).

[0062] Within the present invention, a “functional fragment of the N-terminal 1-27 amino acid residues” means that said functional fragment is still a context-independent epitope maintaining its three-dimensional structural integrity when taken out of its native environment in the CD3 complex (and fused to a heterologous amino acid sequence such as EpCAM or an immunoglobulin Fc part, e.g. as shown in Example 3.1). The maintenance of the three-dimensional structure within the 27 amino acid N-terminal polypeptide or functional fragment thereof of CD3 epsilon can be used for the generation of binding domains which bind to the N-terminal CD3 epsilon polypeptide fragment in vitro and to the native (CD3 epsilon subunit of the) CD3 complex on T cells in vivo with the same binding affinity. Within the present invention, a functional fragment of the N-terminal 1-27 amino acid residues means that CD3 binding molecules provided herein can still bind to such functional fragments in a context-independent manner. The person skilled in the art is aware of methods for epitope mapping to determine which amino acid residues of an epitope are recognized by such anti-CD3 binding molecules (e.g. alanin scanning or pep spot analysis).

[0063] In a preferred embodiment of the invention, the polypeptide of the invention comprises a (first) binding domain capable of binding to an epitope of human and non-chimpanzee primate CD3ε chain and a second binding domain capable of binding to a cell surface antigen.

[0064] The term “cell surface antigen” as used herein denotes a molecule, which is displayed on the surface of a cell. In most cases, this molecule will be located in or on the plasma membrane of the cell such that at least part of this molecule remains accessible from outside the cell in tertiary form. A non-limiting example of a cell surface molecule, which is located in the plasma membrane is a transmembrane protein comprising, in its tertiary conformation, regions of hydrophilicity and hydrophobicity. Here, at least one hydrophobic region allows the cell surface molecule to be embedded, or inserted in the hydrophobic plasma membrane of the cell while the hydrophilic regions extend on either side of the plasma membrane into the cytoplasm and extracellular space, respectively. Non-limiting examples of cell surface molecules which are located on the plasma membrane are proteins which have been modified at a cysteine residue to bear a palmitoyl group, proteins modified at a C-terminal cysteine residue to bear a farnesyl group or proteins which have been modified at the C-terminus to bear a glycosyl phosphatidyl inositol (“GPI”) anchor. These groups allow covalent attachment of proteins to the outer surface of the plasma membrane, where they remain accessible for recognition by extracellular molecules such as antibodies. Examples of cell surface antigens include EGFR, EGFRvIII, MCSP, Carbonic anhydrase IX (CAIX), CD30, CD33, Her2/neu, IgE, CD44v6 and Muc-1. Additionally, examples for corresponding cell surface antibodies comprise antigens which are characteristic for a specific disease or ailment, i.e. cancer, autoimmune diseases or infections diseases including viral infections. Accordingly, the term “cell surface antigens” explicitly includes viral proteins such as native, unprocessed viral proteins exposed on the surface of infected cells (described inter alia for envelop proteins of Hepatitis virus B, C and HIV-1).

[0065] One defense function of cytotoxic T cells is the destruction of virus-infected cells, therefore, the unique property of the bispecific binding molecules of the invention to activate and redirect cytotoxic T cells irrespecitve of their autochthonous specificity has a great impact on the broad field of chronic virus infections. For the majority of these infections elimination of persistently infected cells is the only chance for cure. Currently, adoptive T cell therapies are currently being developed against chronic CMV and EBV infections (Rooney, C. M., et al., Use of gene-modified virus-specific T lymphocytes to control Epstein-Barr-virus-related lymphoproliferation. Lancet, 1995. 345 (8941): p. 9-13; Walter, E. A., et al., Reconstitution of cellular immunity against cytomegalovirus in recipients of allogeneic bone marrow by transfer of T-cell clones from the donor. N Engl J Med, 1995. 333 (16): p. 1038-44).

[0066] Chronic hepatitis B infection is clearly one of the most interesting and rewarding indications. Worldwide between 350 and 400 million people are infected with HBV. Current treatment of chronic HBV hepatitis rests on interferon γ □ and nucleoside or nucleotide analogues, a long term therapy with considerable side-effects such as induction of hepatitis flares, fever, myalgias, thrombocytopenia and depression. Although there are now more than 4 approved therapeutic regimens, elimination of the virus is rarely achieved. A persistent inflammation in chronic hepatitis B leads to liver cirrhosis and hepatocellular carcinoma in more than 25% of patients. Moreover, up to 40% of patients with chronic hepatitis B will die from serious complications, accounting for 0.6 to 1.0 million deaths per year worldwide

[0067] HBV, the prototype of the Hepadnaviruses is an enveloped virus whose relaxed circular (rc) genome is reverse transcribed into an RNA pregenome. After infection the rc DNA is imported into the hepatocyte nucleus where it is completed to a covalently closed circular DNA (cccDNA) containing four overlapping reading frames. It serves as transcription template for the pregenomic RNA and three subgenomic RNAs. The RNA pregenome functions as mRNA for translation of the viral core and polymerase protein. Infected cells produce continuously HBV surface protein (HBsAg) from the cccDNA even when HBV replication is stopped. HBsAg consists of the small surface (S) proteins with very few portions of middle and large (L) surface proteins. Both the HBV S and L are targeted to the Endoplasmatic Reticulum (ER) membrane from where they are transported in membrane vesicles via the trans golgi organelle to the plasma membrane (Gorelick, F. S. and C. Shugrue, Exiting the endoplasmic reticulum. Mol Cell Endocrinol, 2001. 177 (1-2): p. 13-8). S and L proteins are permanently expressed on the surface of HBV replicating hepatocytes as shown recently (Chu, C. M. and Y. F. Liaw, Membrane staining for hepatitis B surface antigen on hepatocytes: a sensitive and specific marker of active viral replication in hepatitis B. J Clin Pathol, 1995. 48(5): p. 470-3).

[0068] Prototype viruses that expose envelope proteins at the cell surface are Hepatitis virus B (HBV), Hepatitis virus C (HCV) and HIV-1 both of which represent an enormous burden of disease globally. For the HIV-1 virus indication, it has recently been shown that T cells modified by a chimeric TCR with an Fv antibody construct directed at the gp120 envelope protein can kill HIV-1 infected target cells (Masiero, S., et al., T-cell engineering by a chimeric T-cell receptor with antibody-type specificity for the HIV-1 gp120. Gene Ther, 2005. 12 (4): p. 299-310). Of the hepadna viruses, hepatitis virus B (HBV) expresses the envelope protein complex HBsAg which is continuously produced from episomal cccDNA even when HBV replication subsides.

[0069] The expression as intact S and L HBV proteins on the cell surface makes them accessible for antibodies which are the hallmark of seroconversion when patients recover from the acute phase of infections and change from circulating HBsAg to antiHBs. If seroconversion does not occur, up to 30% of hepatocytes continue to express HBV S protein also after highly active antiviral therapy of long duration. Thus beyond T lymphocytes recognizing specifically intracellularly processed HBV peptides and presented by MHC molecules at the cell surface other forms of T cell engagement are feasible aimed at intact surface protein such as S and L antigens accessible in the outer cell membrane. Using single chain antibody fragments recognizing hepatitis B virus small (S) and large (L) envelope proteins, artificial T-cell receptors have been generated which allow directing grafted T-cells to infected hepatocytes and upon antigen contact activation of these T-cells to secrete cytokines and kill infected hepatocytes.

[0070] The limitation of this approach is, (i) that T-cells need to be manipulated in vitro, (ii) retroviruses used to transfer the T-cell receptors may cause insertional mutagenesis in the T-cells, and (iii) that once T-cells have been transferred the cytotoxic response cannot be limited.

[0071] To overcome these limitations, bispecific single chain antibody molecules comprising a first domain with a binding specificity for the human and the non-chimpanzee primate CD3 epsilon antigen (as provided herein in context of this invention) as well as a second domain with a binding specificity for HBV or HCV envelop proteins of infected hepatocytes may be generated and are within the scope of this invention.

[0072] Within the present invention it is further preferred that the second binding domain binds to the humancell surface antigen and/or the non-chimpanzee primate counterparts of the human cell surface antigens selected from EGFR, Her2/neu or IgE.

[0073] For the generation of the second binding domain of the polypeptide of the invention, e.g. bispecific single chain antibodies as defined herein, monoclonal antibodies binding to both of the respective human and/or non-chimpanzee primate cell surface antigens can be utilized. Appropriate binding domains for the bispecific polypeptide as defined herein e.g. can be derived from cross-species specific monoclonal antibodies by recombinant methods described in the art. A monoclonal antibody binding to a human cell surface antigen and to the homolog of said cell surface antigen in a non-chimpanzee primate can be tested by FACS assays as set forth above. It is evident to those skilled in the art that cross-species specific antibodies can also be generated by hybridoma techniques described in the literature (Milstein and Köhler, Nature 256 (1975), 495-7). For example, mice may be alternately immunized with human and non-chimpanzee primate CD33. From these mice, cross-species specific antibody-producing hybridoma cells are isolated via hybridoma technology and analysed by FACS as set forth above. The generation and analysis of bispecific polypeptides such as bispecific single chain antibodies exhibiting cross-species specificity as described herein is shown in the following examples. The advantages of the bispecific single chain antibodies exhibiting cross-species specificity include the points enumerated below.

[0074] It is particularly preferred for the polypeptide of the invention that the first binding domain capable of binding to an epitope of human and non-chimpanzee primate CD3ε chain comprises a VL region comprising CDR-L1, CDR-L2 and CDR-L3 selected from:
[0075] (a) CDR-L1 as depicted in SEQ ID NO. 27, CDR-L2 as depicted in SEQ ID NO. 28 and CDR-L3 as depicted in SEQ ID NO. 29;
[0076] (b) CDR-L1 as depicted in SEQ ID NO. 117, CDR-L2 as depicted in SEQ ID NO. 118 and CDR-L3 as depicted in SEQ ID NO. 119; and
[0077] (c) CDR-L1 as depicted in SEQ ID NO. 153, CDR-L2 as depicted in SEQ ID NO. 154 and CDR-L3 as depicted in SEQ ID NO. 155.

[0078] The variable regions, i.e. the variable light chain (“L” of “VL”) and the variable heavy chain (“H” or “VH”) are understood in the art to provide the binding domain of an antibody. This variable regions harbor the complementary determining regions.

[0079] The term “complementary determining region” (CDR) is well known in the art to dictate the antigen specificity of an antibody. The term “CDR-L” or “L CDR” refers to CDRs in the VL, whereas the term “CDR-H” or “H CDR” refers to the CDRs in the VH.

[0080] In an alternatively preferred embodiment of the polypeptide of the invention the first binding domain capable of binding to an epitope of human and non-chimpanzee primate CD3ε chain comprises a VH region comprising CDR-H1, CDR-H2 and CDR-H3 selected from:
[0081] (a) CDR-H1 as depicted in SEQ ID NO. 12, CDR-H2 as depicted in SEQ ID NO. 13 and CDR-H3 as depicted in SEQ ID NO. 14;
[0082] (b) CDR-H1 as depicted in SEQ ID NO. 30, CDR-H2 as depicted in SEQ ID NO. 31 and CDR-H3 as depicted in SEQ ID NO. 32;
[0083] (c) CDR-H1 as depicted in SEQ ID NO. 48, CDR-H2 as depicted in SEQ ID NO. 49 and CDR-H3 as depicted in SEQ ID NO. 50;
[0084] (d) CDR-H1 as depicted in SEQ ID NO. 66, CDR-H2 as depicted in SEQ ID NO. 67 and CDR-H3 as depicted in SEQ ID NO. 68;
[0085] (e) CDR-H1 as depicted in SEQ ID NO. 84, CDR-H2 as depicted in SEQ ID NO. 85 and CDR-H3 as depicted in SEQ ID NO. 86;
[0086] (f) CDR-H1 as depicted in SEQ ID NO. 102, CDR-H2 as depicted in SEQ ID NO. 103 and CDR-H3 as depicted in SEQ ID NO. 104;
[0087] (g) CDR-H1 as depicted in SEQ ID NO. 120, CDR-H2 as depicted in SEQ ID NO. 121 and CDR-H3 as depicted in SEQ ID NO. 122;
[0088] (h) CDR-H1 as depicted in SEQ ID NO. 138, CDR-H2 as depicted in SEQ ID NO. 139 and CDR-H3 as depicted in SEQ ID NO. 140;
[0089] (i) CDR-H1 as depicted in SEQ ID NO. 156, CDR-H2 as depicted in SEQ ID NO. 157 and CDR-H3 as depicted in SEQ ID NO. 158; and
[0090] (j) CDR-H1 as depicted in SEQ ID NO. 174, CDR-H2 as depicted in SEQ ID NO. 175 and CDR-H3 as depicted in SEQ ID NO. 176.

[0091] It is further preferred that the first binding domain capable of binding to an epitope of human and non-chimpanzee primate CD3ε chain comprises a VL region selected from the group consisting of a VL region as depicted in SEQ ID NO. 35, 39, 125, 129, 161 or 165.

[0092] It is alternatively preferred that the first binding domain capable of binding to an epitope of human and non-chimpanzee primate CD3ε chain comprises a VH region selected from the group consisting of a VH region as depicted in SEQ ID NO. 15, 19, 33, 37, 51, 55, 69, 73, 87, 91, 105, 109, 123, 127, 141, 145, 159, 163, 177 or 181.

[0093] More preferably, the polypeptide of the invention is characterized by the first binding domain capable of binding to an epitope of human and non-chimpanzee primate CD3ε chain, which comprises a VL region and a VH region selected from the group consisting of:
[0094] (a) a VL region as depicted in SEQ ID NO. 17 or 21 and a VH region as depicted in SEQ ID NO. 15 or 19;
[0095] (b) a VL region as depicted in SEQ ID NO. 35 or 39 and a VH region as depicted in SEQ ID NO. 33 or 37;
[0096] (c) a VL region as depicted in SEQ ID NO. 53 or 57 and a VH region as depicted in SEQ ID NO. 51 or 55;
[0097] (d) a VL region as depicted in SEQ ID NO. 71 or 75 and a VH region as depicted in SEQ ID NO. 69 or 73;
[0098] (e) a VL region as depicted in SEQ ID NO. 89 or 93 and a VH region as depicted in SEQ ID NO. 87 or 91;
[0099] (f) a VL region as depicted in SEQ ID NO. 107 or 111 and a VH region as depicted in SEQ ID NO. 105 or 109;
[0100] (g) a VL region as depicted in SEQ ID NO. 125 or 129 and a VH region as depicted in SEQ ID NO. 123 or 127;
[0101] (h) a VL region as depicted in SEQ ID NO. 143 or 147 and a VH region as depicted in SEQ ID NO. 141 or 145;
[0102] (i) a VL region as depicted in SEQ ID NO. 161 or 165 and a VH region as depicted in SEQ ID NO. 159 or 163; and
[0103] (j) a VL region as depicted in SEQ ID NO. 179 or 183 and a VH region as depicted in SEQ ID NO. 177 or 181.

[0104] According to a preferred embodiment of the polypeptide of the invention the pairs of VH-regions and VL-regions are in the format of a single chain antibody (scFv). The VH and VL regions are arranged in the order VH-VL or VL-VH. It is preferred that the VH-region is positioned N-terminally to a linker sequence. The VL-region is positioned C-terminally of the linker sequence.

[0105] A preferred embodiment of the above described polypeptide of the invention is characterized by the first binding domain capable of binding to an epitope of human and non-chimpanzee primate CD3ε chain comprising an amino acid sequence selected from the group consisting of SEQ ID NOs: 23, 25, 41, 43, 59, 61, 77, 79, 95, 97, 113, 115, 131, 133, 149, 151, 167, 169, 185 or 187.

[0106] The invention further relates to an above described polypeptide, wherein the second binding domain binds to a cell surface antigen, which is preferably a tumor antigen.

[0107] The term “tumor antigen” as used herein may be understood as those antigens that are presented on tumor cells. These antigens can be presented on the cell surface with an extracellular part, which is often combined with a transmembrane and cytoplasmic part of the molecule. These antigens can sometimes be presented only by tumor cells and never by the normal ones. Tumor antigens can be exclusively expressed on tumor cells or might represent a tumor specific mutation compared to normal cells. In this case, they are called tumor-specific antigens. More common are antigens that are presented by tumor cells and normal cells, and they are called tumor-associated antigens. These tumor-associated antigens can be overexpressed compared to normal cells or are accessible for antibody binding in tumor cells due to the less compact structure of the tumor tissue compared to normal tissue. Non-limiting examples of tumor antigens as used herein are EGFR (Liu, Br. J. Cancer 82/12 (2000), 1991-1999; Bonner, Semin. Radiat. Oncol. 12 (2002), 11-20; Kiyota, Oncology 63/1 (2002), 92-98; Kuan, Brain Tumor Pathol. 17/2 (2000), 71-78).

[0108] EGFR (also known as c-erb1 or HER1) belongs to the erbB receptor tyrosine kinase family. When activated by binding of a ligand from the EGF family of growth factors, EGFR homodimerizes or heterodimerizes with a second EGFR or another member of the erbB receptor family, respectively, initiating a signaling cascade through mitogen-activated protein kinases and other transcription factors leading to proliferation, differentiation and repair (Olayioye, EMBO J. 19 (2000), 3159-67). EGFR is overexpressed in many epithelial cancers, including colorectal, breast, lung, and head and neck cancers (Mendelsohn, J. Clin. Oncol. 21 (2003), 2787-99; Mendelsohn, J. Clin. Oncol. 20 (18, Suppl.) (2002), 1S-13S; Prewett, Clin. Cancer Res. 8 (2002), 994-1003). Overexpression and/or mutation of EGFR in malignant cells leads to constitutive activation of kinase activity resulting in proliferation, angiogenesis, invasion, metastasis, and inhibition of apoptosis (Mendelsohn (2003, loc. cit.; Ciardiello, Clin. Cancer Res. 7 (2001), 2958-70; Perez-Soler, Oncologist 9 (2004), 58-67). Monoclonal antibodies that target the extracellular ligand binding domain or the intracellular tyrosine kinase signaling cascade of EGFR have been shown efficacy as antitumor target (Laskin, Cancer Treat. Review 30 (2004), 1-17). For example, cetuximab (Erbitux) a humanized monoclonal antibody to EGFR, which competitively inhibits the extracellular domain of EGFR to inhibit ligand activation of the receptor, was approved by the Food and Drug Administration (FDA) in 2004 for the treatment of metastatic colon cancer in combination with the topoisomerase inhibitor irinotecan.

[0109] In a preferred embodiment of the invention the polypeptide is a bispecific single chain antibody molecule.

[0110] The herein above described problems with regard to the development of surrogate molecules for preclinical studies is further aggravated, if the drug candidate is a bispecific antibody, e.g. a bispecific single chain antibody. Such a bispecific antibody requires that both antigens recognized are cross-species specific with a given animal species to allow for safety testing in such animal.

[0111] As also noted herein above, the present invention provides polypeptides comprising a first binding domain capable of binding to an epitope of human and non-chimpanzee primate CD3ε chain and a second binding domain capable of binding to a cell surface antigen selected from EGFR, Her2/neu or IgE, wherein the second binding domain preferably also binds to a cell surface antigen of a human and/or a non-chimpanzee primate. The advantage of bispecific single chain antibody molecules as drug candidates fulfilling the requirements of the preferred polypeptide of the invention is the use of such molecules in preclinical animal testing as well as in clinical studies and even for therapy in human. In a preferred embodiment of the cross-species specific bispecific single chain antibodies of the invention the second binding domain capable of binding to a cell surface antigen is of human origin. In a cross-species specific bispecific molecule according to the invention the binding domain capable of binding to an epitope of human and non-chimpanzee primate CD3 epsilon chain is located in the order VH-VL or VL-VH at the N-terminus or the C-terminus of the bispecific molecule. Examples for cross-species specific bispecific molecules according to the invention in different arrangements of the VH- and the VL-chain in the first and the second binding domain are described in the appended examples.

[0112] As used herein, a “bispecific single chain antibody” denotes a single polypeptide chain comprising two binding domains. Each binding domain comprises one variable region from an antibody heavy chain (“VH region”), wherein the VH region of the first binding domain specifically binds to the CD3ε molecule, and the VH region of the second binding domain specifically binds to a cell surface antigen, as defined in more detail below. The two binding domains are optionally linked to one another by a short polypeptide spacer. A non-limiting example for a polypeptide spacer is Gly-Gly-Gly-Gly-Ser (G-G-G-S) and repeats thereof. Each binding domain may additionally comprise one variable region from an antibody light chain (“VL region”), the VH region and VL region within each of the first and second binding domains being linked to one another via a polypeptide linker, for example of the type disclosed and claimed in EP 623679 B1, but in any case long enough to allow the VH region and VL region of the first binding domain and the VH region and VL region of the second binding domain to pair with one another such that, together, they are able to specifically bind to the respective first and second molecules.

[0113] According to a preferred embodiment of the invention an above characterized bispecific single chain antibody molecule comprises a group of the following sequences as CDR H1, CDR H2, CDR H3, CDR L1, CDR L2 and CDR L3 in the second binding domain selected from SEQ ID NO: 441-446, SEQ ID NO: 453-458, SEQ ID NO: 463-468, SEQ ID NO: 481-486.

[0114] A particularly preferred embodiment of the invention concerns an above characterized polypeptide, wherein the bispecific single chain antibody molecule comprises a sequence selected from:
[0115] (a) an amino acid sequence as depicted in any of SEQ ID NOs:389, 391, 393, 395, 397, 399, 409, 411, 413, 415, 417, 419, 429, 431, 433, 435, 437, 439, 447, 449, 451, 469, 471, 473, 475, 477, 479, 495, 497, 499, 501, 503 and 505; and
[0116] (b) an amino acid sequence encoded by a nucleic acid sequence as depicted in any of SEQ ID NOs: 390, 392, 394, 396, 398, 400, 410, 412, 414, 416, 418, 420, 430, 432, 434, 436, 438, 440, 448, 450, 452, 470, 472, 474, 476, 478, 480, 496, 498, 500, 502, 504 and 506.

[0117] In a preferred embodiment of the invention, the bispecific single chain antibodies are cross-species specific for CD3 epsilon and for the tumor antigen recognized by their second binding domain.

[0118] In an alternative embodiment the present invention provides a nucleic acid sequence encoding an above described polypeptide of the invention.

[0119] The present invention also relates to a vector comprising the nucleic acid molecule of the present invention.

[0120] Many suitable vectors are known to those skilled in molecular biology, the choice of which would depend on the function desired and include plasmids, cosmids, viruses, bacteriophages and other vectors used conventionally in genetic engineering. Methods which are well known to those skilled in the art can be used to construct various plasmids and vectors; see, for example, the techniques described in Sambrook et al. (loc cit.) and Ausubel, Current Protocols in Molecular Biology, Green Publishing Associates and Wiley Interscience, N.Y. (1989), (1994). Alternatively, the polynucleotides and vectors of the invention can be reconstituted into liposomes for delivery to target cells. As discussed in further details below, a cloning vector was used to isolate individual sequences of DNA. Relevant sequences can be transferred into expression vectors where expression of a particular polypeptide is required. Typical cloning vectors include pBluescript SK, pGEM, pUC9, pBR322 and pGBT9. Typical expression vectors include pTRE, pCAL-n-EK, pESP-1, pOP13CAT.

[0121] Preferably said vector comprises a nucleic acid sequence which is a regulatory sequence operably linked to said nucleic acid sequence defined herein.

[0122] The term “regulatory sequence” refers to DNA sequences, which are necessary to effect the expression of coding sequences to which they are ligated. The nature of such control sequences differs depending upon the host organism. In prokaryotes, control sequences generally include promoter, ribosomal binding site, and terminators. In eukaryotes generally control sequences include promoters, terminators and, in some instances, enhancers, transactivators or transcription factors. The term “control sequence” is intended to include, at a minimum, all components the presence of which are necessary for expression, and may also include additional advantageous components.

[0123] The term “operably linked” refers to a juxtaposition wherein the components so described are in a relationship permitting them to function in their intended manner. A control sequence “operably linked” to a coding sequence is ligated in such a way that expression of the coding sequence is achieved under conditions compatible with the control sequences. In case the control sequence is a promoter, it is obvious for a skilled person that double-stranded nucleic acid is preferably used.

[0124] Thus, the recited vector is preferably an expression vector. An “expression vector” is a construct that can be used to transform a selected host and provides for expression of a coding sequence in the selected host. Expression vectors can for instance be cloning vectors, binary vectors or integrating vectors. Expression comprises transcription of the nucleic acid molecule preferably into a translatable mRNA. Regulatory elements ensuring expression in prokaryotes and/or eukaryotic cells are well known to those skilled in the art. In the case of eukaryotic cells they comprise normally promoters ensuring initiation of transcription and optionally poly-A signals ensuring termination of transcription and stabilization of the transcript. Possible regulatory elements permitting expression in prokaryotic host cells comprise, e.g., the P_{L}, lac, trp or tac promoter in E. coli, and examples of regulatory elements permitting expression in eukaryotic host cells are the AOX1 or GAL1 promoter in yeast or the CMV-, SV40-, RSV-promoter (Rous sarcoma virus), CMV-enhancer, SV40-enhancer or a globin intron in mammalian and other animal cells.

[0125] Beside elements, which are responsible for the initiation of transcription such regulatory elements may also comprise transcription termination signals, such as the SV40-poly-A site or the tk-poly-A site, downstream of the polynucleotide. Furthermore, depending on the expression system used leader sequences capable of directing the polypeptide to a cellular compartment or secreting it into the medium may be added to the coding sequence of the recited nucleic acid sequence and are well known in the art; see also the appended Examples. The leader sequence(s) is (are) assembled in appropriate phase with translation, initiation and termination sequences, and preferably, a leader sequence capable of directing secretion of translated protein, or a portion thereof, into the periplasmic space or extracellular medium. Optionally, the heterologous sequence can encode a fusion protein including an N-terminal identification peptide imparting desired characteristics, e.g., stabilization or simplified purification of expressed recombinant product; see supra. In this context, suitable expression vectors are known in the art such as Okayama-Berg cDNA expression vector pcDV1 (Pharmacia), pCDM8, pRc/CMV, pcDNA1, pcDNA3 (In-vitrogene), pEF-DHFR, pEF-ADA or pEF-neo (Mack et al. PNAS (1995) 92, 7021-7025 and Raum et al. Cancer Immunol Immunother (2001) 50(3), 141-150) or pSPORT1 (GIBCO BRL).

[0126] Preferably, the expression control sequences will be eukaryotic promoter systems in vectors capable of transforming of transfecting eukaryotic host cells, but control sequences for prokaryotic hosts may also be used. Once the vector has been incorporated into the appropriate host, the host is maintained under conditions suitable for high level expression of the nucleotide sequences, and as desired, the collection and purification of the polypeptide of the invention may follow; see, e.g., the appended examples.

[0127] An alternative expression system, which can be used to express a cell cycle interacting protein is an insect system. In one such system, Autographa californica nuclear polyhedrosis virus (AcNPV) is used as a vector to express foreign genes in Spodoptera frugiperda cells or in Trichoplusia larvae. The coding sequence of a recited nucleic acid molecule may be cloned into a nonessential region of the virus, such as the polyhedrin gene, and placed under control of the polyhedrin promoter. Successful insertion of said coding sequence will render the polyhedrin gene inactive and produce recombinant virus lacking coat protein coat. The recombinant viruses are then used to infect S. frugiperda cells or Trichoplusia larvae in which the protein of the invention is expressed (Smith, J. Virol. 46 (1983), 584; Engelhard, Proc. Nat. Acad. Sci. USA 91 (1994), 3224-3227).

[0128] Additional regulatory elements may include transcriptional as well as translational enhancers. Advantageously, the above-described vectors of the invention comprise a selectable and/or scorable marker.

[0129] Selectable marker genes useful for the selection of transformed cells and, e.g., plant tissue and plants are well known to those skilled in the art and comprise, for example, antimetabolite resistance as the basis of selection for dhfr, which confers resistance to methotrexate (Reiss, Plant Physiol. (Life Sci. Adv.) 13 (1994), 143-149); npt, which confers resistance to the aminoglycosides neomycin, kanamycin and paromycin (Herrera-Estrella, EMBO J. 2 (1983), 987-995) and hygro, which confers resistance to hygromycin (Marsh, Gene 32 (1984), 481-485). Additional selectable genes have been described, namely trpB, which allows cells to utilize indole in place of tryptophan; hisD, which allows cells to utilize histinol in place of histidine (Hartman, Proc. Natl. Acad. Sci. USA 85 (1988), 8047); mannose-6-phosphate isomerase which allows cells to utilize mannose (WO 94/20627) and ODC (ornithine decarboxylase) which confers resistance to the ornithine decarboxylase inhibitor, 2-(difluoromethyl)-DL-ornithine, DFMO (McConlogue, 1987, In: Current Communications in Molecular Biology, Cold Spring Harbor Laboratory ed.) or deaminase from Aspergillus terreus which confers resistance to Blasticidin S (Tamura, Biosci. Biotechnol. Biochem. 59 (1995), 2336-2338).

[0130] Useful scorable markers are also known to those skilled in the art and are commercially available. Advantageously, said marker is a gene encoding luciferase (Giacomin, Pl. Sci. 116 (1996), 59-72; Scikantha, J. Bact. 178 (1996), 121), green fluorescent protein (Gerdes, FEBS Lett. 389 (1996), 44-47) or β-glucuronidase (Jefferson, EMBO J. 6 (1987), 3901-3907). This embodiment is particularly useful for simple and rapid screening of cells, tissues and organisms containing a recited vector.

[0131] As described above, the recited nucleic acid molecule can be used alone or as part of a vector to express the polypeptide of the invention in cells, for, e.g., purification but also for gene therapy purposes. The nucleic acid molecules or vectors containing the DNA sequence(s) encoding any one of the above described polypeptide of the invention is introduced into the cells which in turn produce the polypeptide of interest. Gene therapy, which is based on introducing therapeutic genes into cells by ex-vivo or in-vivo techniques is one of the most important applications of gene transfer. Suitable vectors, methods or gene-delivery systems for in-vitro or in-vivo gene therapy are described in the literature and are known to the person skilled in the art; see, e.g., Giordano, Nature Medicine 2 (1996), 534-539; Schaper, Circ. Res. 79 (1996), 911-919; Anderson, Science 256 (1992), 808-813; Verma, Nature 389 (1994), 239; Isner, Lancet 348 (1996), 370-374; Muhlhauser, Circ. Res. 77 (1995), 1077-1086; Onodera, Blood 91 (1998), 30-36; Verma, Gene Ther. 5 (1998), 692-699; Nabel, Ann. N.Y. Acad. Sci. 811 (1997), 289-292; Verzeletti, Hum. Gene Ther. 9 (1998), 2243-51; Wang, Nature Medicine 2 (1996), 714-716; WO 94/29469; WO 97/00957, U.S. Pat. No. 5,580,859; U.S. Pat. No. 5,589,466; or Schaper, Current Opinion in Biotechnology 7 (1996), 635-640. The recited nucleic acid molecules and vectors may be designed for direct introduction or for introduction via liposomes, or viral vectors (e.g., adenoviral, retroviral) into the cell. Preferably, said cell is a germ line cell, embryonic cell, or egg cell or derived there from, most preferably said cell is a stem cell. An example for an embryonic stem cell can be, inter alia, a stem cell as described in Nagy, Proc. Natl. Acad. Sci. USA 90 (1993), 8424-8428.

[0132] The invention also provides for a host transformed or transfected with a vector of the invention. Said host may be produced by introducing the above described vector of the invention or the above described nucleic acid molecule of the invention into the host. The presence of at least one vector or at least one nucleic acid molecule in the host may mediate the expression of a gene encoding the above described single chain antibody constructs.

[0133] The described nucleic acid molecule or vector of the invention, which is introduced in the host may either integrate into the genome of the host or it may be maintained extrachromosomally.

[0134] The host can be any prokaryote or eukaryotic cell.

[0135] The term “prokaryote” is meant to include all bacteria, which can be transformed or transfected with DNA or RNA molecules for the expression of a protein of the invention. Prokaryotic hosts may include gram negative as well as gram positive bacteria such as, for example, E. coli, S. typhimurium, Serratia marcescens and Bacillus subtilis. The term “eukaryotic” is meant to include yeast, higher plant, insect and preferably mammalian cells. Depending upon the host employed in a recombinant production procedure, the protein encoded by the polynucleotide of the present invention may be glycosylated or may be non-glycosylated. Especially preferred is the use of a plasmid or a virus containing the coding sequence of the polypeptide of the invention and genetically fused thereto an N-terminal FLAG-tag and/or C-terminal His-tag. Preferably, the length of said FLAG-tag is about 4 to 8 amino acids, most preferably 8 amino acids. An above described polynucleotide can be used to transform or transfect the host using any of the techniques commonly known to those of ordinary skill in the art. Furthermore, methods for preparing fused, operably linked genes and expressing them in, e.g., mammalian cells and bacteria are well-known in the art (Sambrook, loc cit.).

[0136] Preferably, said the host is a bacterium or an insect, fungal, plant or animal cell.

[0137] It is particularly envisaged that the recited host may be a mammalian cell. Particularly preferred host cells comprise CHO cells, COS cells, myeloma cell lines like SP2/0 or NS/0. As illustrated in the appended examples, particularly preferred are CHO-cells as hosts.

[0138] More preferably said host cell is a human cell or human cell line, e.g. per.c6 (Kroos, Biotechnol. Prog., 2003, 19:163-168).

[0139] In a further embodiment, the present invention thus relates to a process for the production of a polypeptide of the invention, said process comprising culturing a host of the invention under conditions allowing the expression of the polypeptide of the invention and recovering the produced polypeptide from the culture.

[0140] The transformed hosts can be grown in fermentors and cultured according to techniques known in the art to achieve optimal cell growth. The polypeptide of the invention can then be isolated from the growth medium, cellular lysates, or cellular membrane fractions. The isolation and purification of the, e.g., microbially expressed polypeptides of the invention may be by any conventional means such as, for example, preparative chromatographic separations and immunological separations such as those involving the use of monoclonal or polyclonal antibodies directed, e.g., against a tag of the polypeptide of the invention or as described in the appended examples.

[0141] The conditions for the culturing of a host, which allow the expression are known in the art to depend on the host system and the expression system/vector used in such process. The parameters to be modified in order to achieve conditions allowing the expression of a recombinant polypeptide are known in the art. Thus, suitable conditions can be determined by the person skilled in the art in the absence of further inventive input.

[0142] Once expressed, the polypeptide of the invention can be purified according to standard procedures of the art, including ammonium sulfate precipitation, affinity columns, column chromatography, gel electrophoresis and the like; see, Scopes, “Protein Purification”, Springer-Verlag, N.Y. (1982). Substantially pure polypeptides of at least about 90 to 95% homogeneity are preferred, and 98 to 99% or more homogeneity are most preferred, for pharmaceutical uses. Once purified, partially or to homogeneity as desired, the polypeptide of the invention may then be used therapeutically (including extracorporeally) or in developing and performing assay procedures. Furthermore, examples for methods for the recovery of the polypeptide of the invention from a culture are described in detail in the appended examples.

[0143] Furthermore, the invention provides for a composition comprising a polypeptide of the invention or a polypeptide as produced by the process disclosed above. Preferably, said composition is a pharmaceutical composition.

[0144] In accordance with the invention, the term “pharmaceutical composition” relates to a composition for administration to a patient, preferably a human patient. The particular preferred pharmaceutical composition of this invention comprises binding molecules directed against and generated against context-independent CD3 epitopes. Preferably, the pharmaceutical composition comprises suitable formulations of carriers, stabilizers and/or excipients. In a preferred embodiment, the pharmaceutical composition comprises a composition for parenteral, transdermal, intraluminal, intraarterial, intrathecal and/or intranasal administration or by direct injection into tissue. It is in particular envisaged that said composition is administered to a patient via infusion or injection. Administration of the suitable compositions may be effected by different ways, e.g., by intravenous, intraperitoneal, subcutaneous, intramuscular, topical or intradermal administration. In particular, the present invention provides for an uninterrupted administration of the suitable composition. As a non-limiting example, uninterrupted, i.e. continuous administration may be realized by a small pump system worn by the patient for metering the influx of therapeutic agent into the body of the patient. The pharmaceutical composition comprising the binding molecules directed against and generated against context-independent CD3 epitopes of the invention can be administered by using said pump systems. Such pump systems are generally known in the art, and commonly rely on periodic exchange of cartridges containing the therapeutic agent to be infused. When exchanging the cartridge in such a pump system, a temporary interruption of the otherwise uninterrupted flow of therapeutic agent into the body of the patient may ensue. In such a case, the phase of administration prior to cartridge replacement and the phase of administration following cartridge replacement would still be considered within the meaning of the pharmaceutical means and methods of the invention together make up one “uninterrupted administration” of such therapeutic agent.

[0145] The continuous or uninterrupted administration of these binding molecules directed against and generated against context-independent CD3 epitopes of this invention may be intravenuous or subcutaneous by way of a fluid delivery device or small pump system including a fluid driving mechanism for driving fluid out of a reservoir and an actuating mechanism for actuating the driving mechanism. Pump systems for subcutaneous administration may include a needle or a cannula for penetrating the skin of a patient and delivering the suitable composition into the patient's body. Said pump systems may be directly fixed or attached to the skin of the patient independently of a vein, artery or blood vessel, thereby allowing a direct contact between the pump system and the skin of the patient. The pump system can be attached to the skin of the patient for 24 hours up to several days. The pump system may be of small size with a reservoir for small volumes. As a non-limiting example, the volume of the reservoir for the suitable pharmaceutical composition to be administered can be between 0.1 and 50 ml.

[0146] The continuous administration may be transdermal by way of a patch worn on the skin and replaced at intervals. One of skill in the art is aware of patch systems for drug delivery suitable for this purpose. It is of note that transdermal administration is especially amenable to uninterrupted administration, as exchange of a first exhausted patch can advantageously be accomplished simultaneously with the placement of a new, second patch, for example on the surface of the skin immediately adjacent to the first exhausted patch and immediately prior to removal of the first exhausted patch. Issues of flow interruption or power cell failure do not arise.

[0147] The composition of the present invention, comprising in particular binding molecules directed against and generated against context-independent CD3 epitopes may further comprise a pharmaceutically acceptable carrier. Examples of suitable pharmaceutical carriers are well known in the art and include solutions, e.g. phosphate buffered saline solutions, water, emulsions, such as oil/water emulsions, various types of wetting agents, sterile solutions, liposomes, etc. Compositions comprising such carriers can be formulated by well known conventional methods. Formulations can comprise carbohydrates, buffer solutions, amino acids and/or surfactants. Carbohydrates may be non-reducing sugars, preferably trehalose, sucrose, octasulfate, sorbitol or xylitol. Such formulations may be used for continuous administrations which may be intravenuous or subcutaneous with and/or without pump systems. Amino acids may be charged amino acids, preferably lysine, lysine acetate, arginine, glutamate and/or histidine. Surfactants may be detergents, preferably with a molecular weight of >1.2 KD and/or a polyether, preferably with a molecular weight of >3 KD. Non-limiting examples for preferred detergents are Tween 20, Tween 40, Tween 60, Tween 80 or Tween 85. Non-limiting examples for preferred polyethers are PEG 3000, PEG 3350, PEG 4000 or PEG 5000. Buffer systems used in the present invention can have a preferred pH of 5-9 and may comprise citrate, succinate, phosphate, histidine and acetate. The compositions of the present invention can be administered to the subject at a suitable dose which can be determined e.g. by dose escalating studies by administration of increasing doses of the polypeptide of the invention exhibiting cross-species specificity described herein to non-chimpanzee primates, for instance macaques. As set forth above, the polypeptide of the invention exhibiting cross-species specificity described herein can be advantageously used in identical form in preclinical testing in non-chimpanzee primates and as drug in humans. These compositions can also be administered in combination with other proteinaceous and non-proteinaceous drugs. These drugs may be administered simultaneously with the composition comprising the polypeptide of the invention as defined herein or separately before or after administration of said polypeptide in timely defined intervals and doses. The dosage regimen will be determined by the attending physician and clinical factors. As is well known in the medical arts, dosages for any one patient depend upon many factors, including the patient's size, body surface area, age, the particular compound to be administered, sex, time and route of administration, general health, and other drugs being administered concurrently. Preparations for parenteral administration include sterile aqueous or non-aqueous solutions, suspensions, and emulsions. Examples of non-aqueous solvents are propylene glycol, polyethylene glycol, vegetable oils such as olive oil, and injectable organic esters such as ethyl oleate. Aqueous carriers include water, alcoholic/aqueous solutions, emulsions or suspensions, including saline and buffered media. Parenteral vehicles include sodium chloride solution, Ringer's dextrose, dextrose and sodium chloride, lactated Ringer's, or fixed oils. Intravenous vehicles include fluid and nutrient replenishers, electrolyte replenishers (such as those based on Ringer's dextrose), and the like. Preservatives and other additives may also be present such as, for example, antimicrobials, anti-oxidants, chelating agents, inert gases and the like. In addition, the composition of the present invention might comprise proteinaceous carriers, like, e.g., serum albumin or immunoglobulin, preferably of human origin. It is envisaged that the composition of the invention might comprise, in addition to the polypeptide of the invention defined herein, further biologically active agents, depending on the intended use of the composition. Such agents might be drugs acting on the gastro-intestinal system, drugs acting as cytostatica, drugs preventing hyperurikemia, drugs inhibiting immunoreactions (e.g. corticosteroids), drugs modulating the inflammatory response, drugs acting on the circulatory system and/or agents such as cytokines known in the art.

[0148] The biological activity of the pharmaceutical composition defined herein can be determined for instance by cytotoxicity assays, as described in the following examples, in WO 99/54440 or by Schlereth et al. (Cancer Immunol. Immunother. 20 (2005), 1-12). “Efficacy” or “in vivo efficacy” as used herein refers to the response to therapy by the pharmaceutical composition of the invention, using e.g. standardized NCI response criteria. The success or in vivo efficacy of the therapy using a pharmaceutical composition of the invention refers to the effectiveness of the composition for its intended purpose, i.e. the ability of the composition to cause its desired effect, i.e. depletion of pathologic cells, e.g. tumor cells. The in vivo efficacy may be monitored by established standard methods for the respective disease entities including, but not limited to white blood cell counts, differentials, Fluorescence Activated Cell Sorting, bone marrow aspiration. In addition, various disease specific clinical chemistry parameters and other established standard methods may be used. Furthermore, computer-aided tomography, X-ray, nuclear magnetic resonance tomography (e.g. for National Cancer Institute-criteria based response assessment [Cheson B D, Horning S J, Coiffier B, Shipp M A, Fisher R I, Connors J M, Lister T A, Vose J, Grillo-Lopez A, Hagenbeek A, Cabanillas F, Klippensten D, Hiddemann W, Castellino R, Harris N L, Armitage J O, Carter W, Hoppe R, Canellos G P. Report of an international workshop to standardize response criteria for non-Hodgkin's lymphomas. NCI Sponsored International Working Group. J Clin Oncol. 1999 April; 17(4):1244]), positron-emission tomography scanning, white blood cell counts, differentials, Fluorescence Activated Cell Sorting, bone marrow aspiration, lymph node biopsies/histologies, and various lymphoma specific clinical chemistry parameters (e.g. lactate dehydrogenase) and other established standard methods may be used.

[0149] Another major challenge in the development of drugs such as the pharmaceutical composition of the invention is the predictable modulation of pharmacokinetic properties. To this end, a pharmacokinetic profile of the drug candidate, i.e. a profile of the pharmacokinetic parameters that effect the ability of a particular drug to treat a given condition, is established. Pharmacokinetic parameters of the drug influencing the ability of a drug for treating a certain disease entity include, but are not limited to: half-life, volume of distribution, hepatic first-pass metabolism and the degree of blood serum binding. The efficacy of a given drug agent can be influenced by each of the parameters mentioned above.

[0150] “Half-life” means the time where 50% of an administered drug are eliminated through biological processes, e.g. metabolism, excretion, etc.

[0151] By “hepatic first-pass metabolism” is meant the propensity of a drug to be metabolized upon first contact with the liver, i.e. during its first pass through the liver.

[0152] “Volume of distribution” means the degree of retention of a drug throughout the various compartments of the body, like e.g. intracellular and extracellular spaces, tissues and organs, etc. and the distribution of the drug within these compartments.

[0153] “Degree of blood serum binding” means the propensity of a drug to interact with and bind to blood serum proteins, such as albumin, leading to a reduction or loss of biological activity of the drug.

[0154] Pharmacokinetic parameters also include bioavailability, lag time (Tlag), Tmax, absorption rates, more onset and/or Cmax for a given amount of drug administered.

[0155] “Bioavailability” means the amount of a drug in the blood compartment.

[0156] “Lag time” means the time delay between the administration of the drug and its detection and measurability in blood or plasma.

[0157] “Tmax” is the time after which maximal blood concentration of the drug is reached, and “Cmax” is the blood concentration maximally obtained with a given drug. The time to reach a blood or tissue concentration of the drug which is required for its biological effect is influenced by all parameters. Pharmacokinetik parameters of bispecific single chain antibodies, a preferred embodiment of the polypeptide of the invention, exhibiting cross-species specificity, which may be determined in preclinical animal testing in non-chimpanzee primates as outlined above are also set forth e.g. in the publication by Schlereth et al. (Cancer Immunol. Immunother. 20 (2005), 1-12).

[0158] The term “toxicity” as used herein refers to the toxic effects of a drug manifested in adverse events or severe adverse events. These side events might refer to a lack of tolerability of the drug in general and/or a lack of local tolerance after administration. Toxicity could also include teratogenic or carcinogenic effects caused by the drug.

[0159] The term “safety”, “in vivo safety” or “tolerability” as used herein defines the administration of a drug without inducing severe adverse events directly after administration (local tolerance) and during a longer period of application of the drug. “Safety”, “in vivo safety” or “tolerability” can be evaluated e.g. at regular intervals during the treatment and follow-up period. Measurements include clinical evaluation, e.g. organ manifestations, and screening of laboratory abnormalities. Clinical evaluation may be carried out and deviating to normal findings recorded/coded according to NCI-CTC and/or MedDRA standards. Organ manifestations may include criteria such as allergy/immunology, blood/bone marrow, cardiac arrhythmia, coagulation and the like, as set forth e.g. in the Common Terminology Criteria for adverse events v3.0 (CTCAE). Laboratory parameters which may be tested include for instance haematology, clinical chemistry, coagulation profile and urine analysis and examination of other body fluids such as serum, plasma, lymphoid or spinal fluid, liquor and the like. Safety can thus be assessed e.g. by physical examination, imaging techniques (i.e. ultrasound, x-ray, CT scans, Magnetic Resonance Imaging (MRI), other measures with technical devices (i.e. electrocardiogram), vital signs, by measuring laboratory parameters and recording adverse events. For example, adverse events in non-chimpanzee primates in the uses and methods according to the invention may be examined by histopathological and/or histochemical methods.

[0160] The term “effective and non-toxic dose” as used herein refers to a tolerable dose of the bispecific single chain antibody as defined herein which is high enough to cause depletion of pathologic cells, tumor elimination, tumor shrinkage or stabilization of disease without or essentially without major toxic effects. Such effective and non-toxic doses may be determined e.g. by dose escalation studies described in the art and should be below the dose inducing severe adverse side events (dose limiting toxicity, DLT).

[0161] The above terms are also referred to e.g. in the Preclinical safety evaluation of biotechnology-derived pharmaceuticals S6; ICH Harmonised Tripartite Guideline; ICH Steering Committee meeting on Jul. 16, 1997.

[0162] Moreover, the invention relates to a pharmaceutical composition comprising a polypeptide of this invention (i.e. a polypeptide comprising at least one binding domain capable of binding to an epitope of human and non-chimpanzee primate CD3 epsilon chain, wherein the epitope is part of an amino acid sequence comprised in the group consisting of SEQ ID NOs. 2, 4, 6, or 8 in accordance with this invention or produced according to the process according to the invention) for the prevention, treatment or amelioration of a disease selected from a proliferative disease, a tumorous disease, or an immunological disorder. Preferably, said pharmaceutical composition further comprises suitable formulations of carriers, stabilizers and/or excipients.

[0163] A further aspect of the invention relates to a use of a polypeptide as defined herein above or produced according to a process defined herein above, for the preparation of a pharmaceutical composition for the prevention, treatment or amelioration of a disease. Preferably, said disease is a proliferative disease, a tumorous disease, or an immunological disorder. It is further preferred that said tumorous disease is a malignant disease, preferably cancer.

[0164] In another preferred embodiment of use of the polypeptide of the invention said pharmaceutical composition is suitable to be administered in combination with an additional drug, i.e. as part of a co-therapy. In said co-therapy, an active agent may be optionally included in the same pharmaceutical composition as the polypeptide of the invention, or may be included in a separate pharmaceutical composition. In this latter case, said separate pharmaceutical composition is suitable for administration prior to, simultaneously as or following administration of said pharmaceutical composition comprising the polypeptide of the invention. The additional drug or pharmaceutical composition may be a non-proteinaceous compound or a proteinaceous compound. In the case that the additional drug is a proteinaceous compound, it is advantageous that the proteinaceous compound be capable of providing an activation signal for immune effector cells.

[0165] Preferably, said proteinaceous compound or non-proteinaceous compound may be administered simultaneously or non-simultaneously with the polypeptide of the invention, a nucleic acid molecule as defined hereinabove, a vector as defined as defined hereinabove, or a host as defined as defined hereinabove.

[0166] Another aspect of the invention relates to a method for the prevention, treatment or amelioration of a disease in a subject in the need thereof, said method comprising the step of administration of an effective amount of a pharmaceutical composition of the invention. Preferably, said disease is a proliferative disease, a tumorous disease, or an immunological disorder. Even more preferred, said tumorous disease is a malignant disease, preferably cancer.

[0167] In another preferred embodiment of the method of the invention said pharmaceutical composition is suitable to be administered in combination with an additional drug, i.e. as part of a co-therapy. In said co-therapy, an active agent may be optionally included in the same pharmaceutical composition as the polypeptide of the invention, or may be included in a separate pharmaceutical composition. In this latter case, said separate pharmaceutical composition is suitable for administration prior to, simultaneously as or following administration of said pharmaceutical composition comprising the polypeptide of the invention. The additional drug or pharmaceutical composition may be a non-proteinaceous compound or a proteinaceous compound. In the case that the additional drug is a proteinaceous compound, it is advantageous that the proteinaceous compound be capable of providing an activation signal for immune effector cells.

[0168] Preferably, said proteinaceous compound or non-proteinaceous compound may be administered simultaneously or non-simultaneously with the polypeptide of the invention, a nucleic acid molecule as defined hereinabove, a vector as defined as defined hereinabove, or a host as defined as defined hereinabove.

[0169] It is preferred for the above described method of the invention that said subject is a human.

[0170] In a further aspect, the invention relates to a kit comprising a polypeptide of the invention, a nucleic acid molecule of the invention, a vector of the invention, or a host of the invention.

[0171] The present invention is further characterized by the following list of items:

[0172] Item 1. A method for the identification of (a) polypeptide(s) comprising a cross-species specific binding domain capable of binding to an epitope of human and non-chimpanzee primate CD3 epsilon (CD3ε), the method comprising the steps of:

[0173] (a) contacting the polypeptide(s) with an N-terminal fragment of the extracellular domain of CD3ε of maximal 27 amino acids comprising the amino acid sequence Gln-Asp-Gly-Asn-Glu-Glu-Met-Gly (SEQ ID NO. 381) or Gln-Asp-Gly-Asn-Glu-Glu-Ile-Gly (SEQ ID NO. 382), fixed via its C-terminus to a solid phase;

[0174] (b) eluting the bound polypeptide(s) from said fragment; and

[0175] (c) isolating the polypeptide(s) from the eluate of (b).

[0176] It is preferred that the polypeptide(s) identified by the above method of the invention are of human origin.

[0177] The present “method for the identification of (a) polypeptide(s)” is understood as a method for the isolation of one or more different polypeptides with the same specificity for the fragment of the extracellular domain of CD3ε comprising at its N-terminus the amino acid sequence Gln-Asp-Gly-Asn-Glu-Glu-Met-Gly (SEQ ID NO. 381) or Gln-Asp-Gly-Asn-Glu-Glu-Ile-Gly (SEQ ID NO. 382) from a plurality of polypeptide candidates as well as a method for the purification of a polypeptide from a solution. Non-limiting embodiments of a method of the isolation of one or more different polypeptides with the same specificity for the fragment of the extracellular domain of CD3ε comprise methods for the selection of antigen-specific binding entities, e.g. panning methods as commonly used for hybridoma screening, screening of transiently/stably transfected clones of eukaryotic host cells or in phage display methods. A non-limiting example for the latter method for the purification of a polypeptide from a solution is e.g. the purification of a recombinantly expressed polypeptide from a culture supernatant or a preparation from such culture.

[0178] As stated above the fragment used in the method of the invention is a N-terminal fragment of the extracellular domain of the primate CD3ε molecule. The amino acid sequence of the extracellular domain of the CD3ε molecule of different primates is depicted in SEQ ID NOs: 1, 3, 5 and 7. The two forms of the N-terminal octamer are depicted in SEQ ID NOs: 381 and 382. It is preferred that this N-terminus is freely available for binding of the polypeptides to be identified by the method of the invention. The term “freely available” is understood in the context of the invention as free of additional motives such as a His-tag. The interference of such a His-tag with a binding molecule identified by the method of the invention is described in the appended Example 6.

[0179] According to the method of the invention said fragment is fixed via its C-terminus to a solid phase. The person skilled in the art will easily and without any inventive ado elect a suitable solid phase support dependent from the used embodiment of the method of the invention. Examples for a solid support comprise but are not limited to matrices like beads (e.g. agarose beads, sepharose beads, polystyrol beads, dextran beads), plates (culture plates or MultiWell plates) as well as chips known e.g. from Biacore®. The selection of the means and methods for the fixation/immobilization of the fragment to said solid support depend on the election of the solid support. A commonly used method for the fixation/immobilization is a coupling via an N-hydroxysuccinimide (NHS) ester. The chemistry underlying this coupling as well as alternative methods for the fixation/immobilization are known to the person skilled in the art, e.g. from Hermanson “Bioconjugate Techniques”, Academic Press, Inc. (1996). For the fixation to/immobilization on chromatographic supports the following means are commonly used: NHS-activated sepharose (e.g. HiTrap-NHS of GE Life Science—Amersham), CnBr-activated sepharose (e.g. GE Life Science—Amersham), NHS-activated dextran beads (Sigma) or activated polymethacrylate. These reagents may also be used in a batch approach. Moreover, dextran beads comprising iron oxide (e.g. available from Miltenyi) may be used in a batch approach. These beads may be used in combination with a magnet for the separation of the beads from a solution. Polypeptides can be immobilized on a Biacore chip (e.g. CM5 chips) by the use of NHS activated carboxymethyldextran. Further examples for an appropriate solid support are amine reactive MultiWell plates (e.g. Nunc Immobilizer™ plates).

[0180] According to the method of the invention said fragment of the extracellular domain of CD3 epsilon can be directly coupled to the solid support or via a stretch of amino acids, which might be a linker or another protein/polypeptide moiety. Alternatively, the extracellular domain of CD3 epsilon can be indirectly coupled via one or more adaptor molecule(s).

[0181] Means and methods for the eluation of a peptide bound to an immobilized epitope are well known in the art. The same holds true for methods for the isolation of the identified polypeptide(s) from the eluate.

[0182] In line with the invention a method for the isolation of one or more different polypeptides with the same specificity for the fragment of the extracellular domain of CD3ε comprising at its N-terminus the amino acid sequence Gln-Asp-Gly-Asn-Glu-Glu-X-Gly from a plurality of polypeptide candidates may comprise one or more steps of the following methods for the selection of antigen-specific entities:

[0183] CD3ε specific binding molecules can be selected from antibody derived repertoires. A phage display library can be constructed based on standard procedures, as for example disclosed in “Phage Display: A Laboratory Manual”; Ed. Barbas, Burton, Scott & Silverman; Cold Spring Harbor Laboratory Press, 2001. The format of the antibody fragments in the antibody library can be scFv, but may generally also be a Fab fragment or even a single domain antibody fragment. For the isolation of antibody fragments naïve antibody fragment libraries may be used. For the selection of potentially low immunogenic binding entities in later therapeutic use, human antibody fragment libraries may be favourable for the direct selection of human antibody fragments. In some cases they may form the basis for synthetic antibody libraries (Knappik et al. J Mol. Biol. 2000, 296:57 ff). The corresponding format may be Fab, scFv (as described below) or domain antibodies (dAbs, as reviewed in Holt et al., Trends Biotechnol. 2003, 21:484 ff).

[0184] It is also known in the art that in many cases there is no immune human antibody source available against the target antigen. Therefore animals are immunized with the target antigen and the respective antibody libraries isolated from animal tissue as e.g. spleen or PBMCs. The N-terminal fragment may be biotinylated or covalently linked to proteins like KLH or bovine serum albumin (BSA). According to common approaches rodents are used for immunization. Some immune antibody repertoires of non-human origin may be especially favourable for other reasons, e.g. for the presence of single domain antibodies (VHH) derived from cameloid species (as described in Muyldermans, J Biotechnol. 74:277; De Genst et al. Dev Como Immunol. 2006, 30:187 ff). Therefore a corresponding format of the antibody library may be Fab, scFv (as described below) or single domain antibodies (VHH).

[0185] In one possible approach ten weeks old F1 mice from balb/c×C57black crossings can be immunized with whole cells e.g. expressing transmembrane EpCAM N-terminally displaying as translational fusion the N-terminal amino acids 1 to 27 of the mature CD3ε chain. Alternatively, mice can be immunized with 1-27 CD3 epsilon-Fc fusion protein (a corresponding approach is described in the appended Example 2). After booster immunization(s), blood samples can be taken and antibody serum titer against the CD3-positive T cells can be tested e.g. in FACS analysis. Usually, serum titers are significantly higher in immunized than in non-immunized animals.

[0186] Immunized animals may form the basis for the construction of immune antibody libraries. Examples of such libraries comprise phage display libraries. Such libraries may be generally constructed based on standard procedures, as for example disclosed in “Phage Display: A Laboratory Manual”; Ed. Barbas, Burton, Scott & Silverman; Cold Spring Harbor Laboratory Press, 2001.

[0187] The non-human antibodies can also be humanized via phage display due to the generation of more variable antibody libraries that can be subsequently enriched for binders during selection.

[0188] In a phage display approach any one of the pools of phages that displays the antibody libraries forms a basis to select binding entities using the respective antigen as target molecule. The central step in which antigen specific, antigen bound phages are isolated is designated as panning. Due to the display of the antibody fragments on the surface of the phages, this general method is called phage display. One preferred method of selection is the use of small proteins such as the filamentous phage N2 domain translationally fused to the N-terminus of the scFv displayed by the phage. Another display method known in the art, which may be used to isolate binding entities is the ribosome display method (reviewed in Groves & Osbourn, Expert Opin Biol Ther. 2005, 5:125 ff; Lipovsek & Pluckthun, J Immunol Methods 2004, 290:52 ff).

[0189] In order to demonstrate binding of scFv phage particles to a 1-27 CD3ε-Fc fusion protein a phage library carrying the cloned scFv-repertoire can be harvested from the respective culture supernatant by PEG (polyethyleneglycole). ScFv phage particles may be incubated with immobilized CD3ε Fc fusion protein. The immobilized CD3ε Fc fusion protein may be coated to a solid phase. Binding entities can be eluted and the eluate can be used for infection of fresh uninfected bacterial hosts. Bacterial hosts successfully transduced with a phagemid copy, encoding a human scFv-fragment, can be selected again for carbenicillin resistance and subsequently infected with e.g. VCMS 13 helper phage to start the second round of antibody display and in vitro selection. A total of 4 to 5 rounds of selections is carried out, normally.

[0190] The binding of isolated binding entities can be tested on CD3epsilon positive Jurkat cells, HPBaII cells, PBMCs or transfected eukaryotic cells that carry the N-terminal CD3ε sequence fused to surface displayed EpCAM using a flow cytometric assay (see appended Example 4).

[0191] Item 2. The method of item 1, wherein the polypeptide(s) comprise(s) the identified binding domain as a first binding domain and a second binding domain capable of binding to a cell surface antigen.

[0192] For the generation of the second binding domain of the polypeptide identified by the method of the invention, e.g. bispecific single chain antibodies as defined herein, monoclonal antibodies binding to both of the respective human and non-chimpanzee primate cell surface antigens can be used. Appropriate binding domains for the bispecific polypeptide as defined herein e.g. can be derived from cross-species specific monoclonal antibodies by recombinant methods described in the art. A monoclonal antibody binding to a human cell surface antigen and to the homolog of said cell surface antigen in a non-chimpanzee primate can be tested by FACS assays as set forth above. Hybridoma techniques as described in the literature (Milstein and Köhler, Nature 256 (1975), 495-7) can also be used for the generation of cross-species specific antibodies. For example, mice may be alternately immunized with human and non-chimpanzee primate CD33. From these mice, cross-species specific antibody-producing hybridoma cells can be isolated via hybridoma technology and analysed by FACS as set forth above. The generation and analysis of bispecific polypeptides such as bispecific single chain antibodies exhibiting cross-species specificity as described herein is shown in the following Examples. The advantages of the bispecific single chain antibodies exhibiting cross-species specificity include the points enumerated below.

[0193] Item 3. The method of item 2, wherein the second binding domain binds to a cell surface antigen of a human and/or a non-chimpanzee primate.

[0194] Item 4. The method of any of items 1 to 3, wherein the first binding domain is an antibody.

[0195] Item 5. The method of item 4, wherein the antibody is a single chain antibody.

[0196] Item 6. The method of any of items 2 to 5, wherein the second binding domain is an antibody.

[0197] Item 7. The method of any of items 1 to 6, wherein the fragment of the extracellular domain of CD3ε consists of one or more fragments of a polypeptide having an amino acid sequence of any one depicted in SEQ ID NOs.2, 4, 6 or 8.

[0198] Item 8. The method of item 7, wherein said fragment is 8, 9, 10, 11, 12, 13, 14, 15, 16, 17, 18, 19, 20, 21, 22, 23, 24, 25, 26, 27 amino acid residues in length.

[0199] Item 9. The method of any of items 1 to 8, wherein the method of identification is a method of screening a plurality of polypeptides comprising a cross-species specific binding domain capable of binding to an epitope of human and non-chimpanzee primate CD3ε.

[0200] Item 10. The method of any of items 1 to 8, wherein the method of identification is a method of purification/isolation of a polypeptide comprising a cross-species specific binding domain capable of binding to an epitope of human and non-chimpanzee primate CD3ε.

[0201] Item 11. Use of an N-terminal fragment of the extracellular domain of CD3ε of maximal 27 amino acids comprising the amino acid sequence Gln-Asp-Gly-Asn-Glu-Glu-Met-Gly (SEQ ID NO. 381) or Gln-Asp-Gly-Asn-Glu-Glu-Ile-Gly (SEQ ID NO. 382) for the generation of a cross-species specific binding domain.

[0202] In line with said use of the invention it is preferred that the generated cross-species specific binding domain is of human origin.

[0203] Item 12. Use according to item 11, wherein the cross-species specific binding domain is an antibody.

[0204] Item 13. Use according to item 12, wherein the antibody is a single chain antibody.

[0205] Item 14. Use according to item 12 to 13, wherein the antibody is a bispecific antibody.

[0206] These and other embodiments are disclosed and encompassed by the description and Examples of the present invention. Recombinant techniques and methods in immunology are described e.g. in Sambrook et al. Molecular Cloning: A Laboratory Manual; Cold Spring Harbor Laboratory Press, 3^{rd} edition 2001; Lefkovits; Immunology Methods Manual; The Comprehensive Sourcebook of Techniques; Academic Press, 1997; Golemis; Protein-Protein Interactions: A Molecular Cloning Manual; Cold Spring Laboratory Press, 2002. Further literature concerning any one of the antibodies, methods, uses and compounds to be employed in accordance with the present invention may be retrieved from public libraries and databases, using for example electronic devices. For example, the public database “Medline”, available on the Internet, may be utilized, for example under http://www.ncbi.nlm.nih.gov/PubMed/medline.html. Further databases and addresses such as http://www.ncbi.nlm.nih.gov/ or listed at the EMBL-services homepage under http://www.embl.de/services/index.html are known to the person skilled in the art and can also be obtained using, e. g., http://www.google.com.

[0207] The figures show:

[0208] FIG. 1

[0209] Fusion of the N-terminal amino acids 1-27 of primate CD3 epsilon to a heterologous soluble protein.

[0210] FIG. 2

[0211] The figure shows the average absorption values of quadruplicate samples measured in an ELISA assay detecting the presence of a construct consisting of the N-terminal amino acids 1-27 of the mature human CD3 epsilon chain fused to the hinge and Fc gamma portion of human IgG1 and a C-terminal 6 Histidine tag in a supernatant of transiently transfected 293 cells. The first column labeled “27 aa huCD3E” shows the average absorption value for the construct, the second column labeled “irrel. SN” shows the average value for a supernatant of 293 cells transfected with an irrelevant construct as negative control. The comparison of the values obtained for the construct with the values obtained for the negative control clearly demonstrates the presence of the recombinant construct.

[0212] FIG. 3

[0213] The figure shows the average absorption values of quadruplicate samples measured in an ELISA assay detecting the binding of the cross species specific anti-CD3 binding molecules in form of crude preparations of periplasmatically expressed single-chain antibodies to a construct comprising the N-terminal 1-27 amino acids of the mature human CD3 epsilon chain fused to the hinge and Fc gamma portion of human IgG1 and a C-terminal His6 tag. The columns show from left to right the average absorption values for the specificities designated as A2J HLP, I2C HLP E2M HLP, F7O HLP, G4H HLP, H2C HLP, E1L HLP, F12Q HLP, F6A HLP and H1E HLP. The rightmost column labelled “neg. contr.” shows the average absorption value for the single-chain preparation of a murine anti-human CD3 antibody as negative control. The comparison of the values obtained for the anti-CD3 specificities with the values obtained for the negative control clearly demonstrates the strong binding of the anti-CD3 specificities to the N-terminal 1-27 amino acids of the mature human CD3 epsilon chain.

[0214] FIG. 4

[0215] Fusion of the N-terminal amino acids 1-27 of primate CD3 epsilon to a heterologous membrane bound protein.

[0216] FIG. 5

[0217] Histogram overlays of different transfectants tested in a FACS assay detecting the presence of recombinant transmembrane fusion proteins consisting of cynomolgus EpCAM and the N-terminal 1-27 amino acids of the human, marmoset, tamarin, squirrel monkey and domestic swine CD3 epsilon chain respectively. The histogram overlays from left to right and top to bottom show the results for the transfectants expressing the constructs comprising the human 27 mer, marmoset 27 mer, tamarin 27 mer, squirrel monkey 27 mer and swine 27 mer respectively. In the individual overlays the thin line represents a sample incubated with PBS with 2% FCS instead of anti-Flag M2 antibody as negative control and the bold line shows a sample incubated with the anti-Flag M2 antibody. For each construct the overlay of the histograms shows binding of the anti-Flag M2 antibody to the transfectants, which clearly demonstrates the expression of the recombinant constructs on the transfectants.

[0218] FIGS. 6A-E

[0219] Histogram overlays of different transfectants tested in a FACS assay detecting the binding of the cross-species specific anti-CD3 binding molecules in form of crude preparations of periplasmatically expressed single-chain antibodies to the N-terminal amino acids 1-27 of the human, marmoset, tamarin and squirrel monkey CD3 epsilon chain respectively fused to cynomolgus EpCAM.

[0220] FIG. 6A:

[0221] The histogram overlays from left to right and top to bottom show the results for the transfectants expressing the 1-27 CD3-EpCAM comprising the human 27 mer tested with the CD3 specific binding molecules designated H2C HLP, F12Q HLP, E2M HLP and G4H HLP respectively.

[0222] FIG. 6B:

[0223] The histogram overlays from left to right and top to bottom show the results for the transfectants expressing the 1-27 CD3-EpCAM comprising the marmoset 27 mer tested with the CD3 specific binding molecules designated H2C HLP, F12Q HLP, E2M HLP and G4H HLP respectively.

[0224] FIG. 6C:

[0225] The histogram overlays from left to right and top to bottom show the results for the transfectants expressing the 1-27 CD3-EpCAM comprising the tamarin 27 mer tested with the CD3 specific binding molecules designated H2C HLP, F12Q HLP, E2M HLP and G4H HLP respectively.

[0226] FIG. 6D:

[0227] The histogram overlays from left to right and top to bottom show the results for the transfectants expressing the 1-27 CD3-EpCAM comprising the squirrel monkey 27 mer tested with the CD3 specific binding molecules designated H2C HLP, F12Q HLP, E2M HLP and G4H HLP respectively.

[0228] FIG. 6E:

[0229] The histogram overlays from left to right and top to bottom show the results for the transfectants expressing the 1-27 CD3-EpCAM comprising the swine 27 mer tested with the CD3 specific binding molecules designated H2C HLP, F12Q HLP, E2M HLP and G4H HLP respectively.

[0230] In the individual overlays the thin line represents a sample incubated with a single-chain preparation of a murine anti-human CD3-antibody as negative control and the bold line shows a sample incubated with the respective anti-CD3 binding molecules indicated. Considering the lack of binding to the swine 27 mer transfectants and the expression levels of the constructs shown in FIG. 5 the overlays of the histograms show specific and strong binding of the tested anti-CD3 specificities of the fully cross-species specific human bispecific single chain antibodies to cells expressing the recombinant transmembrane fusion proteins comprising the N-terminal amino acids 1-27 of the human, marmoset, tamarin and squirrel monkey CD3 epsilon chain respectively fused to cynomolgus EpCAM and show therefore multi primate cross-species specificity of the anti-CD3 binding molecules.

[0231] FIG. 7

[0232] FACS assay for detection of human CD3 epsilon on transfected murine EL4 T cells. Graphical analysis shows an overlay of histograms. The bold line shows transfected cells incubated with the anti-human CD3 antibody UCHT-1. The thin line represents cells incubated with a mouse IgG1 isotype control. Binding of the anti CD3 antibody UCHT1 clearly shows expression of the human CD3 epsilon chain on the cell surface of transfected murine EL4 T cells.

[0233] FIGS. 8A-D

[0234] Binding of cross-species specific anti CD3 antibodies to alanine-mutants in an alanine scanning experiment. In the individual Figures the columns show from left to right the calculated binding values in arbitrary units in logarithmic scale for the wild-type transfectant (WT) and for all alanine-mutants from the position 1 to 27. The binding values are calculated using the following formula:

$$value\_Sample ( x , y ) = \frac{Sample ( x , y ) - neg\_Contr . ( x )}{\begin{matrix}( UCHT - 1 ( x ) - neg\_Contr . ( x ) ) * \\ \frac{WT ( y ) - neg\_Contr . ( wt )}{UCHT - 1 ( wt ) - neg\_Contr . ( wt )}\end{matrix}}$$

[0235] In this equation value_Sample means the value in arbitrary units of binding depicting the degree of binding of a specific anti-CD3 antibody to a specific alanine-mutant as shown in the Figures, Sample means the geometric mean fluorescence value obtained for a specific anti-CD3 antibody assayed on a specific alanine-scanning transfectant, neg_Contr. means the geometric mean fluorescence value obtained for the negative control assayed on a specific alanine-mutant, UCHT-1 means the geometric mean fluorescence value obtained for the UCHT-1 antibody assayed on a specific alanine-mutant, WT means the geometric mean fluorescence value obtained for a specific anti-CD3 antibody assayed on the wild-type transfectant, x specifies the respective transfectant, y specifies the respective anti-CD3 antibody and wt specifies that the respective transfectant is the wild-type. Individual alanine-mutant positions are labelled with the single letter code of the wild-type amino acid and the number of the position.

[0236] FIG. 8A:

[0237] The figure shows the results for cross-species specific anti CD3 antibody A2J HLP expressed as chimeric IgG molecule. Reduced binding activity is observed for mutations to alanine at position 4 (asparagine), at position 23 (threonine) and at position 25 (isoleucine). Complete loss of binding is observed for mutations to alanine at position 1 (glutamine), at position 2 (aspartate), at position 3 (glycine) and at position 5 (glutamate).

[0238] FIG. 8B:

[0239] The figure shows the results for cross-species specific anti CD3 antibody E2M HLP, expressed as chimeric IgG molecule. Reduced binding activity is observed for mutations to alanine at position 4 (asparagine), at position 23 (threonine) and at position 25 (isoleucine). Complete loss of binding is observed for mutations to alanine at position 1 (glutamine), at position 2 (aspartate), at position 3 (glycine) and at position 5 (glutamate).

[0240] FIG. 8C:

[0241] The figure shows the results for cross-species specific anti CD3 antibody H2C HLP, expressed as chimeric IgG molecule. Reduced binding activity is observed for mutations to alanine at position 4 (asparagine). Complete loss of binding is observed for mutations to alanine glutamine at position 1 (glutamine), at position 2 (aspartate), at position 3 (glycine) and at position 5 (glutamate).

[0242] FIG. 8D:

[0243] shows the results for cross-species specific anti CD3 antibody F12Q HLP, tested as periplasmatically expressed single-chain antibody. Complete loss of binding is observed for mutations to alanine at position 1 (glutamine), at position 2 (aspartate), at position 3 (glycine) and at position 5 (glutamate).

[0244] FIG. 9

[0245] FACS assay detecting the binding of the cross-species specific anti-CD3 binding molecule H2C HLP to human CD3 with and without N-terminal His6 tag.

[0246] Histogram overlays are performed of the EL4 cell line transfected with wild-type human CD3 epsilon chain (left histogram) or the human CD3 epsilon chain with N-terminal His6 tag (right histogram) tested in a FACS assay detecting the binding of cross-species specific binding molecule H2C HLP. Samples are incubated with an appropriate isotype control as negative control (thin line), anti-human CD3 antibody UCHT-1 as positive control (dotted line) and cross-species specific anti-CD3 antibody H2C HLP in form of a chimeric IgG molecule (bold line).

[0247] Histogram overlays show comparable binding of the UCHT-1 antibody to both transfectants as compared to the isotype control demonstrating expression of both recombinant constructs. Histogram overlays also show binding of the anti-CD3 binding molecule H2C HLP only to the wild-type human CD3 epsilon chain but not to the His6-human CD3 epsilon chain. These results demonstrate that a free N-terminus is essential for binding of the cross-species specific anti-CD3 binding molecule H2C HLP.

[0248] FIG. 10

[0249] Saturation binding of EGFR-21-63 LH×H2C on human CD3 positive PBMC to determine the KD value of CD3 binding on cells by FACS analysis. The assay is performed as described in Example 7.

[0250] FIGS. 11A-11D

[0251] FACS binding analysis of designated cross-species specific bispecific single chain constructs to CHO cells transfected with human EGFR, human CD3+ T cell line HPB-ALL, CHO cells transfected with cynomolgus EGFR and a macaque T cell line 4119 LnPx. The FACS staining is performed as described in Example 12. The thick line represents cells incubated with 2 μg/ml purified protein that are subsequently incubated with the anti-his antibody and the PE labeled detection antibody. The thin histogram line reflects the negative control: cells only incubated with the anti-his antibody and the detection antibody.

[0252] FIGS. 12A-12H

[0253] Cytotoxicity activity induced by designated cross-species specific EGFR specific single chain constructs redirected to indicated target cell lines. FIG. 12A) and FIG. 12B) Stimulated CD4−/CD56− human PBMCs are used as effector cells, CHO cells transfected with human EGFR as target cells. The assay is performed as described in Example 13.

[0254] FIGS. 13A-13B

[0255] Cytotoxicity activity induced by designated cross-species specific EGFR specific single chain constructs redirected to indicated target cell lines. FIG. 13A) and FIG. 13B) The macaque T cell line 4119 LnPx are used as effector cells, CHO cells transfected with cynomolgus EGFR as target cells. The assay is performed as described in Example 13.

[0256] FIG. 14

[0257] FACS binding analysis of designated cross-species specific bispecific single chain constructs to CHO cells transfected with the human MCSP D3, human CD3+ T cell line HPB-ALL, CHO cells transfected with cynomolgus MCSP D3 and a macaque T cell line 4119 LnPx. The FACS staining is performed as described in Example 17. The thick line represents cells incubated with 2 μg/ml purified protein that are subsequently incubated with the anti-his antibody and the PE labeled detection antibody. The thin histogram line reflects the negative control: cells only incubated with the anti-his antibody and the detection antibody.

[0258] FIG. 15

[0259] FACS binding analysis of designated cross-species specific bispecific single chain constructs CHO cells transfected with the human MCSP D3, human CD3+ T cell line HPB-ALL, CHO cells transfected with cynomolgus MCSP D3 and a macaque T cell line 4119 LnPx. The FACS staining is performed as described in Example 17. The thick line represents cells incubated with 2 μg/ml purified protein that are subsequently incubated with the anti-his antibody and the PE labeled detection antibody. The thin histogram line reflects the negative control: cells only incubated with the anti-his antibody and the detection antibody.

[0260] FIG. 16

[0261] FACS binding analysis of designated cross-species specific bispecific single chain constructs CHO cells transfected with the human MCSP D3, human CD3+ T cell line HPB-ALL, CHO cells transfected with cynomolgus MCSP D3 and a macaque T cell line 4119 LnPx. The FACS staining is performed as described in Example 17. The thick line represents cells incubated with 2 μg/ml purified monomeric protein that are subsequently incubated with the anti-his antibody and the PE labeled detection antibody. The thin histogram line reflects the negative control: cells only incubated with the anti-his antibody and the detection antibody.

[0262] FIGS. 17A-17B

[0263] Cytotoxicity activity induced by designated cross-species specific MCSP specific single chain constructs redirected to indicated target cell lines. FIG. 17A) Stimulated CD4−/CD56− human PBMCs are used as effector cells, CHO cells transfected with human MCSP D3 as target cells. FIG. 17B) The macaque T cell line 4119 LnPx are used as effector cells, CHO cells transfected with cynomolgus MCSP D3 as target cells. The assay is performed as described in Example 18.

[0264] FIGS. 18A-18B

[0265] Cytotoxicity activity induced by designated cross-species specific MCSP specific single chain constructs redirected to indicated target cell lines. FIG. 18A) and FIG. 18B) The macaque T cell line 4119 LnPx are used as effector cells, CHO cells transfected with cynomolgus MCSP D3 as target cells. The assay is performed as described in Example 18.

[0266] FIGS. 19A-19B

[0267] Cytotoxicity activity induced by designated cross-species specific MCSP specific single chain constructs redirected to indicated target cell lines. FIG. 19A) and FIG. 19B) Stimulated CD4−/CD56− human PBMCs are used as effector cells, CHO cells transfected with human MCSP D3 as target cells. The assay is performed as described in Example 18.

[0268] FIGS. 20A-20B

[0269] Cytotoxicity activity induced by designated cross-species specific MCSP specific single chain constructs redirected to indicated target cell lines. FIG. 20A) Stimulated CD4−/CD56− human PBMCs are used as effector cells, CHO cells transfected with human MCSP D3 as target cells. FIG. 20B) The macaque T cell line 4119 LnPx are used as effector cells, CHO cells transfected with cynomolgus MCSP D3 as target cells. The assay is performed as described in Example 18.

[0270] FIGS. 21A-21B

[0271] Cytotoxicity activity induced by designated cross-species specific MCSP specific single chain constructs redirected to indicated target cell lines. FIG. 21A) Stimulated CD4−/CD56− human PBMCs are used as effector cells, CHO cells transfected with human MCSP D3 as target cells. FIG. 21B) The macaque T cell line 4119 LnPx are used as effector cells, CHO cells transfected with cynomolgus MCSP D3 as target cells. The assay is performed as described in Example 18.

[0272] FIGS. 22A-22C

[0273] Plasma stability of MCSP and CD3 cross-species specific bispecific single chain antibodies tested by the measurement of cytotoxicity activity induced by samples of the designated single chain constructs incubated with 50% human plasma at 37° C. and 4° C. for 24 hours respectively or with addition of 50% human plasma immediately prior to cytotoxicity testing or without addition of plasma. CHO cells transfected with human MCSP are used as target cell line and stimulated CD4−/CD56− human PBMCs are used as effector cells. The assay is performed as described in Example 19.

[0274] FIGS. 23A-23B

[0275] FACS binding analysis of designated cross-species specific bispecific single chain constructs to CHO cells transfected with human HER2, the human CD3+ T cell line HPB-ALL, CHO cells transfected with macaque HER2 and the macaque T cell line 4119LnPx respectively. The FACS staining is performed as described in Example 23.4. The bold lines represent cells incubated with 2 μg/ml purified bispecific single chain construct. The thin lines reflect the negative controls. PBS with 2% FCS was used as negative control. For each cross-species specific bispecific single chain construct the overlay of the histograms shows specific binding of the construct to human and macaque HER2 and human and macaque CD3.

[0276] FIGS. 24A-24D

[0277] The diagrams show results of chromium release assays measuring cytotoxic activity induced by designated cross-species specific HER2 specific single chain constructs redirected to the indicated target cell lines. Effector cells were also used as indicated. The assays are performed as described in Example 23.5. The diagrams clearly demonstrate for each construct shown the potent recruitment of cytotoxic activity of human and macaque effector cells against human and macaque HER2 transfected CHO cells, respectively.

[0278] FIG. 25

[0279] CD3 specific ELISA analysis of periplasmic preparations containing Flag tagged scFv protein fragments from selected clones. Periplasmic preparations of soluble scFv protein fragments were added to wells of an ELISA plate, which had been coated with soluble human CD3 epsilon (aa 1-27)-Fc fusion protein and had been additionally blocked with PBS 3% BSA. Detection was performed by a monoclonal anti Flag-Biotin-labeled antibody followed by peroxidase-conjugated Streptavidin. The ELISA was developed by an ABTS substrate solution. The OD values (y axis) were measured at 405 nm by an ELISA reader. Clone names are presented on the x axis.

[0280] FIG. 26

[0281] ELISA analysis of periplasmic preparations containing Flag tagged scFv protein fragments from selected clones. The same periplasmic preparations of soluble scFv protein fragments as in FIG. 25 were added to wells of an ELISA plate which had not been coated with human CD3 epsilon (aa 1-27)-Fc fusion protein but with huIgG1 (Sigma) and blocked with 3% BSA in PBS.

[0282] Detection was performed by a monoclonal anti Flag-Biotin-labeled antibody followed by peroxidase-conjugated Streptavidin. The ELISA was developed by an ABTS substrate solution. The OD values (y axis) were measured at 405 nm by an ELISA reader. Clone names are presented on the x axis.

[0283] The present invention is additionally described by way of the following illustrative non-limiting examples that provide a better understanding of the present invention and of its many advantages.

### EXAMPLES

### 1. Identification of CD3epsilon Sequences from Blood Samples of Non-Human Primates

[0284] Blood samples of the following non-human primates were used for CD3epsilon-identification: Callithrix jacchus, Saguinus oedipus and Saimiris ciureus. Fresh heparin-treated whole blood samples were prepared for isolating total cellular RNA according to manufacturer's protocol (QIAamp RNA Blood Mini Kit, Qiagen). The extracted mRNA was transcribed into cDNA according to published protocols. In brief, 10 μl of precipitated RNA was incubated with 1.2 μl of 10× hexanucleotide mix (Roche) at 70° C. for 10 minutes and stored on ice. A reaction mix consisting of 4 μl of 5× superscript II buffer, 0.2 μl of 0.1M dithiothreitole, 0.8 μl of superscript II (Invitrogen), 1.2 μl of desoxyribonucleoside triphosphates (25 μM), 0.8 μl of RNase Inhibitor (Roche) and 1.8 μl of DNase and RNase free water (Roth) was added. The reaction mix was incubated at room temperature for 10 minutes followed by incubation at 42° C. for 50 minutes and at 90° C. for 5 minutes. The reaction was cooled on ice before adding 0.8 μl of RNaseH (1 U/μl, Roche) and incubated for 20 minutes at 37° C.

[0285] The first-strand cDNAs from each species were subjected to separate 35-cycle polymerase chain reactions using Taq DNA polymerase (Sigma) and the following primer combination designed on database research: forward primer 5′-AGAGTTCTGGGCCTCTGC-3′ (SEQ ID NO: 377); reverse primer 5′-CGGATGGGCTCATAGTCTG-3′ (SEQ ID NO: 378). The amplified 550 bp-bands were gel purified (Gel Extraction Kit, Qiagen) and sequenced (Sequiserve, Vaterstetten/Germany, see sequence listing).

CD3epsilon Callithrix jacchus

Nucleotides
CAGGACGGTAATGAAGAAATGGGTGATACTACACAGAACCCATATAA
AGTTTCCATCTCAGGAACCACAGTAACACTGACATGCCCTCGGTATG
ATGGACATGAAATAAAATGGCTCGTAAATAGTCAAAACAAAGAAGGT
CATGAGGACCACCTGTTACTGGAGGACTTTTCGGAAATGGAGCAAAG
TGGTTATTATGCCTGCCTCTCCAAAGAGACTCCCGCAGAAGAGGCGA
GCCATTATCTCTACCTGAAGGCAAGAGTGTGTGAGAACTGCGTGGAG
GTGGAT
Amino acids
QDGNEEMGDTTQNPYKVSISGTTVTLTCPRYDGHEIKWLVNSQNKEG
HEDHLLLEDFSEMEQSGYYACLSKETPAEEASHYLYLKARVCENCVE
VD

CD3epsilon Saquinus oedipus

Nucleotides
CAGGACGGTAATGAAGAAATGGGTGATACTACACAGAACCCATATAA
AGTTTCCATCTCAGGAACCACAGTAACACTGACATGCCCTCGGTATG
ATGGACATGAAATAAAATGGCTTGTAAATAGTCAAAACAAAGAAGGT
CATGAGGACCACCTGTTACTGGAGGATTTTTCGGAAATGGAGCAAAG
TGGTTATTATGCCTGCCTCTCCAAAGAGACTCCCGCAGAAGAGGCGA
GCCATTATCTCTACCTGAAGGCAAGAGTGTGTGAGAACTGCGTGGAG
GTGGAT
Amino acids
QDGNEEMGDTTQNPYKVSISGTTVTLTCPRYDGHEIKWLVNSQNKEG
HEDHLLLEDFSEMEQSGYYACLSKETPAEEASHYLYLKARVCENCVE
VD

CD3epsilon Saimiris ciureus

Nucleotides
CAGGACGGTAATGAAGAGATTGGTGATACTACCCAGAACCCATATAA
AGTTTCCATCTCAGGAACCACAGTAACACTGACATGCCCTCGGTATG
ATGGACAGGAAATAAAATGGCTCGTAAATGATCAAAACAAAGAAGGT
CATGAGGACCACCTGTTACTGGAAGATTTTTCAGAAATGGAACAAAG
TGGTTATTATGCCTGCCTCTCCAAAGAGACCCCCACAGAAGAGGCGA
GCCATTATCTCTACCTGAAGGCAAGAGTGTGTGAGAACTGCGTGGAG
GTGGAT
Amino acids
QDGNEEIGDTTQNPYKVSISGTTVTLTCPRYDGQEIKWLVNDQNKEG
HEDHLLLEDFSEMEQSGYYACLSKETPTEEASHYLYLKARVCENCVE
VD

### 2. Generation of Cross-Species Specific Single Chain Antibody Fragments (scFv) Binding to the N-Terminal Amino Acids 1-27 of CD3epsilon of Man and Different Non-Chimpanzee Primates

[0286] 2.1. Immunization of Mice Using the N-Terminus of CD3epsilon Separated from its Native CD3-Context by Fusion to a Heterologous Soluble Protein

[0287] Ten weeks old F1 mice from balb/c×C57black crossings were immunized with the CD3epsilon-Fc fusion protein carrying the most N-terminal amino acids 1-27 of the mature CD3epsilon chain (1-27 CD3-Fc) of man and/or saimiris ciureus. To this end 40 μg of the 1-27 CD3-Fc fusion protein with 10 nmol of a thioate-modified CpG-Oligonucleotide (5′-tccatgacgttcctgatgct-3′) in 300 ul PBS were injected per mouse intra-peritoneally. Mice receive booster immunizations after 21, 42 and optionally 63 days in the same way. Ten days after the first booster immunization, blood samples were taken and antibody serum titer against 1-27 CD3-Fc fusion protein iwa tested by ELISA. Additionally, the titer against the CD3-positive human T cell line HPBaII was tested in flow cytometry according to standard protocols. Serum titers were significantly higher in immunized than in non-immunized animals.

2.2. Generation of an Immune Murine Antibody scFv Library: Construction of a Combinatorial Antibody Library and Phage Display

[0288] Three days after the last injection the murine spleen cells were harvested for the preparation of total RNA according to standard protocols.

[0289] A library of murine immunoglobuline (Ig) light chain (kappa) variable region (VK) and Ig heavy chain variable region (VH) DNA-fragments was constructed by RT-PCR on murine spleen RNA using VK- and VH specific primer. cDNA was synthesized according to standard protocols.

[0290] The primers were designed in a way to give rise to a 5′-XhoI and a 3′-BstEII recognition site for the amplified heavy chain V-fragments and to a 5′-SacI and a 3′-SpeI recognition site for amplified VK DNA fragments.

[0291] For the PCR-amplification of the VH DNA-fragments eight different 5′-VH-family specific primers (MVH1(GC)AG GTG CAG CTC GAG GAG TCA GGA CCT; MVH2 GAG GTC CAG CTC GAG CAG TCT GGA CCT; MVH3 CAG GTC CAA CTC GAG CAG CCT GGG GCT; MVH4 GAG GTT CAG CTC GAG CAG TCT GGG GCA; MVH5 GA(AG) GTG AAG CTC GAG GAG TCT GGA GGA; MVH6 GAG GTG AAG CTT CTC GAG TCT GGA GGT; MVH7 GAA GTG AAG CTC GAG GAG TCT GGG GGA; MVH8 GAG GTT CAG CTC GAG CAG TCT GGA GCT) were each combined with one 3′-VH primer (3′MuVHBstEII tga gga gac ggt gac cgt ggt ccc ttg gcc cca g); for the PCR amplification of the VK-chain fragments seven different 5′-VK-family specific primers (MUVK1 CCA GTT CCG AGC TCG TTG TGA CTC AGG AAT CT; MUVK2 CCA GTT CCG AGC TCG TGT TGA CGC AGC CGC CC; MUVK3 CCA GTT CCG AGC TCG TGC TCA CCC AGT CTC CA; MUVK4 CCA GTT CCG AGC TCC AGA TGA CCC AGT CTC CA; MUVK5 CCA GAT GTG AGC TCG TGA TGA CCC AGA CTC CA; MUVK6 CCA GAT GTG AGC TCG TCA TGA CCC AGT CTC CA; MUVK7 CCA GTT CCG AGC TCG TGA TGA CAC AGT CTC CA) were each combined with one 3′-VK primer (3′MuVkHindIII/BsiW1 tgg tgc act agt cgt acg ttt gat ctc aag ctt ggt ccc).

[0292] The following PCR program was used for amplification: denaturation at 94° C. for 20 sec; primer annealing at 52° C. for 50 sec and primer extension at 72° C. for 60 sec and 40 cycles, followed by a 10 min final extension at 72° C.

[0293] 450 ng of the kappa light chain fragments (SacI-SpeI digested) were ligated with 1400 ng of the phagemid pComb3H5Bhis (SacI-SpeI digested; large fragment). The resulting combinatorial antibody library was then transformed into 300 ul of electrocompetent Escherichia coli XL1 Blue cells by electroporation (2.5 kV, 0.2 cm gap cuvette, 25 uFD, 200 Ohm, Biorad gene-pulser) resulting in a library size of more than 10⁷ independent clones. After one hour of phenotype expression, positive transformants were selected for carbenicilline resistance encoded by the pComb3H5BHis vector in 100 ml of liquid super broth (SB)-culture over night. Cells were then harvested by centrifugation and plasmid preparation was carried out using a commercially available plasmid preparation kit (Qiagen).

[0294] 2800 ng of this plasmid-DNA containing the VK-library (XhoI-BstEII digested; large fragment) were ligated with 900 ng of the heavy chain V-fragments (XhoI-BstEII digested) and again transformed into two 300 ul aliquots of electrocompetent E. coli XL1 Blue cells by electroporation (2.5 kV, 0.2 cm gap cuvette, 25 uFD, 200 Ohm) resulting in a total VH-VK scFv (single chain variable fragment) library size of more than 10⁷ independent clones.

[0295] After phenotype expression and slow adaptation to carbenicillin, the E. coli cells containing the antibody library were transferred into SB-Carbenicillin (50 ug/mL) selection medium. The E. coli cells containing the antibody library was then infected with an infectious dose of 10¹² particles of helper phage VCSM13 resulting in the production and secretion of filamentous M13 phage, wherein phage particle contains single stranded pComb3H5BHis-DNA encoding a murine scFv-fragment and displayed the corresponding scFv-protein as a translational fusion to phage coat protein III. This pool of phages displaying the antibody library was later used for the selection of antigen binding entities.

### 2.3. Phage Display Based Selection of CD3-Specific Binders

[0296] The phage library carrying the cloned scFv-repertoire was harvested from the respective culture supernatant by PEG8000/NaCl precipitation and centrifugation. Approximately 10¹¹ to 10¹² scFv phage particles were resuspended in 0.4 ml of PBS/0.1% BSA and incubated with 10⁵ to 10⁷ Jurkat cells (a CD3-positive human T-cell line) for 1 hour on ice under slow agitation. These Jurkat cells were grown beforehand in RPMI medium enriched with fetal calf serum (10%), glutamine and penicillin/streptomycin, harvested by centrifugation, washed in PBS and resuspended in PBS/1% FCS (containing Na Azide). scFv phage which do not specifically bind to the Jurkat cells were eliminated by up to five washing steps with PBS/1% FCS (containing Na Azide). After washing, binding entities were eluted from the cells by resuspending the cells in HCl-glycine pH 2.2 (10 min incubation with subsequent vortexing) and after neutralization with 2 M Tris pH 12, the eluate was used for infection of a fresh uninfected E. coli XL1 Blue culture (OD600>0.5). The E. coli culture containing E. coli cells successfully transduced with a phagemid copy, encoding a human scFv-fragment, were again selected for carbenicillin resistance and subsequently infected with VCMS 13 helper phage to start the second round of antibody display and in vitro selection. A total of 4 to 5 rounds of selections were carried out, normally.

### 2.4. Screening for CD3-Specific Binders

[0297] Plasmid DNA corresponding to 4 and 5 rounds of panning was isolated from E. coli cultures after selection. For the production of soluble scFv-protein, VH-VL-DNA fragments were excised from the plasmids (XhoI-SpeI). These fragments were cloned via the same restriction sites in the plasmid pComb3H5BFlag/His differing from the original pComb3H5BHis in that the expression construct (e.g. scFv) includes a Flag-tag (TGD YKDDDDK) between the scFv and the His6-tag and the additional phage proteins were deleted. After ligation, each pool (different rounds of panning) of plasmid DNA was transformed into 100 μl heat shock competent E. coli TG1 or XLI blue and plated onto carbenicillin LB-agar. Single colonies were picked into 100 ul of LB carb (50 ug/ml).

[0298] E. coli transformed with pComb3H5BHis containing a VL- and VH-segment produce soluble scFv in sufficient amounts after excision of the gene III fragment and induction with 1 mM IPTG. Due to a suitable signal sequence, the scFv-chain was exported into the periplasma where it folds into a functional conformation.

[0299] Single E. coli TG1 bacterial colonies from the transformation plates were picked for periplasmic small scale preparations and grown in SB-medium (e.g. 10 ml) supplemented with 20 mM MgCl2 and carbenicillin 50 μg/ml (and re-dissolved in PBS (e.g. 1 ml) after harvesting. By four rounds of freezing at −70° C. and thawing at 37° C., the outer membrane of the bacteria was destroyed by temperature shock and the soluble periplasmic proteins including the scFvs were released into the supernatant. After elimination of intact cells and cell-debris by centrifugation, the supernatant containing the human anti-human CD3-scFvs was collected and used for further examination.

### 2.5. Identification of CD3-Specific Binders

[0300] Binding of the isolated scFvs was tested by flow cytometry on eukaryotic cells, which on their surface express a heterologous protein displaying at its N-terminus the first 27 N-terminal amino acids of CD3epsilon.

[0301] As described in Example 4, the first amino acids 1-27 of the N-terminal sequence of the mature CD3 epsilon chain of the human T cell receptor complex (amino acid sequence: QDGNEEMGGITQTPYKVSISGTTVILT) were fused to the N-terminus of the transmembrane protein EpCAM so that the N-terminus was located at the outer cell surface. Additionally, a FLAG epitope was inserted between the N-terminal 1-27 CD3epsilon sequence and the EpCAM sequence. This fusion product was expressed in human embryonic kidney (HEK) and chinese hamster ovary (CHO) cells.

[0302] Eukaryotic cells displaying the 27 most N-terminal amino acids of mature CD3epsilon of other primate species were prepared in the same way for Saimiri ciureus (Squirrel monkey) (CD3epsilon N-terminal amino acid sequence: QDGNEEIGDTTQNPYKVSISGTTVTLT), for Callithrix jacchus (CD3epsilon N-terminal amino acid sequence: QDGNEEMGDTTQNPYKVSISGTTVTLT) and for Saguinus oedipus (CD3epsilon N-terminal amino acid sequence: QDGNEEMGDTTQNPYKVSISGTTVTLT).

[0303] For flow cytometry 2.5×10⁵ cells are incubated with 50 ul supernatant or with 5 μg/ml of the purified constructs in 50 μl PBS with 2% FCS. The binding of the constructs was detected with an anti-His antibody (Penta-His Antibody, BSA free, Qiagen GmbH, Hilden, FRG) at 2 μg/ml in 50 μl PBS with 2% FCS. As a second step reagent a R-Phycoerythrin-conjugated affinity purified F(ab′)2 fragment, goat anti-mouse IgG (Fc-gamma fragment specific), diluted 1:100 in 50 μl PBS with 2% FCS (Dianova, Hamburg, FRG) was used. The samples were measured on a FACSscan (BD biosciences, Heidelberg, FRG).

[0304] Binding was always confirmed by flowcytometry as described in the foregoing paragraph on primary T cells of man and different primates (e.g. saimiris ciureus, callithrix jacchus, saguinus oedipus).

2.6. Generation of Human/Humanized Equivalents of Non-Human CD3epsilon Specific scFvs

[0305] The VH region of the murine anti-CD3 scFv was aligned against human antibody germline amino acid sequences. The human antibody germline VH sequence was chosen which has the closest homology to the non-human VH and a direct alignment of the two amino acid sequences was performed. There were a number of framework residues of the non-human VH that differ from the human VH framework regions (“different framework positions”). Some of these residues may contribute to the binding and activity of the antibody to its target.

[0306] To construct a library that contain the murine CDRs and at every framework position that differs from the chosen human VH sequence both possibilities (the human and the maternal murine amino acid residue), degenerated oligonucleotides were synthesized. These oligonucleotides incorporate at the differing positions the human residue with a probability of 75% and the murine residue with a probability of 25%. For one human VH e.g. six of these oligonucleotides had to be synthesized that overlap in a terminal stretch of approximately 20 nucleotides. To this end every second primer was an antisense primer. Restriction sites needed for later cloning within the oligonucleotides were deleted.

[0307] These primers may have a length of 60 to 90 nucleotides, depending on the number of primers that were needed to span over the whole V sequence.

[0308] These e.g. six primers were mixed in equal amounts (e.g. 1 μl of each primer (primer stocks 20 to 100 μM) to a 20 μl PCR reaction) and added to a PCR mix consisting of PCR buffer, nucleotides and Taq polymerase. This mix was incubated at 94° C. for 3 minutes, 65° C. for 1 minute, 62° C. for 1 minute, 59° C. for 1 minute, 56° C. for 1 minute, 52° C. for 1 minute, 50° C. for 1 minute and at 72° C. for 10 minutes in a PCR cycler. Subsequently the product was run in an agarose gel electrophoresis and the product of a size from 200 to 400 isolated from the gel according to standard methods.

[0309] This PCR product was then used as a template for a standard PCR reaction using primers that incorporate N-terminal and C-terminal suitable cloning restriction sites. The DNA fragment of the correct size (for a VH approximately 350 nucleotides) was isolated by agarose gel electrophoresis according to standard methods. In this way sufficient VH DNA fragment was amplified. This VH fragment was now a pool of VH fragments that have each one a different amount of human and murine residues at the respective differing framework positions (pool of humanized VH). The same procedure was performed for the VL region of the murine anti-CD3 scFv (pool of humanized VL).

[0310] The pool of humanized VH was then combined with the pool of humanized VL in the phage display vector pComb3H5Bhis to form a library of functional scFvs from which—after display on filamentous phage—anti-CD3 binders were selected, screened, identified and confirmed as described above for the parental non-human (murine) anti-CD3 scFv. Single clones were then analyzed for favorable properties and amino acid sequence. Those scFvs which were closest in amino acid sequence homology to human germline V-segments are preferred particularly those wherein at least one CDR among CDR I and II of VH and CDR I and II of VLkappa or CDR I and II of VLlambda shows more than 80% amino acid sequence identity to the closest respective CDR of all human germline V-segments. Anti-CD3 scFvs were converted into recombinant bispecific single chain antibodies as described in the following Examples 10 and 16 and further characterized.

### 3. Generation of a Recombinant Fusion Protein of the N-Terminal Amino Acids 1-27 of the Human CD3 Epsilon Chain Fused to the Fc-Part of an IgG1 (1-27 CD3-Fc)

### 3.1. Cloning and Expression of 1-27 CD3-Fc

[0311] The coding sequence of the 1-27 N-terminal amino acids of the human CD3 epsilon chain fused to the hinge and Fc gamma region of human immunoglobulin IgG1 as well as an 6 Histidine Tag were obtained by gene synthesis according to standard protocols (cDNA sequence and amino acid sequence of the recombinant fusion protein are listed under SEQ ID NOs 350 and 349). The gene synthesis fragment was designed as to contain first a Kozak site for eukaryotic expression of the construct, followed by an 19 amino acid immunoglobulin leader peptide, followed in frame by the coding sequence of the first 27 amino acids of the extracellular portion of the mature human CD3 epsilon chain, followed in frame by the coding sequence of the hinge region and Fc gamma portion of human IgG1, followed in frame by the coding sequence of a 6 Histidine tag and a stop codon (FIG. 1). The gene synthesis fragment was also designed as to introduce restriction sites at the beginning and at the end of the cDNA coding for the fusion protein. The introduced restriction sites, EcoRI at the 5′ end and SalI at the 3′ end, are utilized in the following cloning procedures. The gene synthesis fragment was cloned via EcoRI and SalI into a plasmid designated pEF-DHFR (pEF-DHFR is described in Mack et al. Proc. Natl. Acad. Sci. USA 92 (1995) 7021-7025) following standard protocols. A sequence verified plasmid was used for transfection in the FreeStyle 293 Expression System (Invitrogen GmbH, Karlsruhe, Germany) according to the manufacturers protocol. After 3 days cell culture supernatants of the transfectants were harvested and tested for the presence of the recombinant construct in an ELISA assay. Goat anti-human IgG, Fc-gamma fragment specific antibody (obtained from Jackson ImmunoResearch Europe Ltd., Newmarket, Suffolk, UK) was diluted in PBS to 5 μg/ml and coated with 100 μl per well onto a MaxiSorp 96-well ELISA plate (Nunc GmbH & Co. KG, Wiesbaden, Germany) over night at 4° C. Wells were washed with PBS with 0.05% Tween 20 (PBS/Tween and blocked with 3% BSA in PBS (bovine Albumin, fraction V, Sigma-Aldrich Chemie GmbH, Taufkirchen, Germany) for 60 minutes at room temperature (RT). Subsequently, wells were washed again PBS/Tween and then incubated with cell culture supernatants for 60 minutes at RT. After washing wells were incubated with a peroxidase conjugated anti-His6 antibody (Roche Diagnostics GmbH, Roche Applied Science, Mannheim, Germany) diluted 1:500 in PBS with 1% BSA for 60 minutes at RT. Subsequently, wells were washed with 200 μl PBS/Tween and 100 μl of the SIGMAFAST OPD (SIGMAFAST OPD [o-Phenylenediamine dihydrochloride] substrate solution (Sigma-Aldrich Chemie GmbH, Taufkirchen, Germany) was added according to the manufacturers protocol. The reaction was stopped by adding 100 μl 1 M H₂SO₄. Color reaction was measured on a PowerWaveX microplate spectrophotometer (BioTek Instruments, Inc., Winooski, Vt., USA) at 490 nm and subtraction of background absorption at 620 nm. As shown in FIG. 2 presence of the construct as compared to irrelevant supernatant of mock-transfected HEK 293 cells used as negative control was clearly detectable.

### 3.2. Binding Assay of Cross-Species Specific Single Chain Antibodies to 1-27 CD3-Fc.

[0312] Binding of crude preparations of periplasmatically expressed cross-species specific single chain antibodies specific for CD3 epsilon to 1-27 CD3-Fc was tested in an ELISA assay. Goat anti-human IgG, Fc-gamma fragment specific antibody (Jackson ImmunoResearch Europe Ltd., Newmarket, Suffolk, UK) was diluted in PBS to 5 μg/ml and coated with 100 μl per well onto a MaxiSorp 96-well ELISA plate (Nunc GmbH & Co. KG, Wiesbaden, Germany) over night at 4° C. Wells were washed with PBS with 0.05% Tween 20 (PBS/Tween and blocked with PBS with 3% BSA (bovine Albumin, fraction V, Sigma-Aldrich Chemie GmbH, Taufkirchen, Germany) for 60 minutes at RT. Subsequently, wells were washed with PBS/Tween and incubated with supernatants of cells expressing the 1-27 CD3-Fc construct for 60 minutes at RT. Wells were washed with PBS/Tween and incubated with crude preparations of periplasmatically expressed cross-species specific single-chain antibodies as described above for 60 minutes at room temperature. After washing with PBS/Tween wells were incubated with peroxidase conjugated anti-Flag M2 antibody (Sigma-Aldrich Chemie GmbH, Taufkirchen, Germany) diluted 1:10000 in PBS with 1% BSA for 60 minutes at RT. Wells were washed with PBS/Tween and incubated with 100 μl of the SIGMAFAST OPD (OPD [o-Phenylenediamine dihydrochloride] substrate solution (Sigma-Aldrich Chemie GmbH, Taufkirchen, Germany) according to the manufacturers protocol. Color reaction was stopped with 100 μl 1 M H₂SO₄ and measured on a PowerWaveX microplate spectrophotometer (BioTek Instruments, Inc., Winooski, Vt., USA) at 490 nm and subtraction of background absorption at 620 nm. Strong binding of cross-species specific human single chain antibodies specific for CD3 epsilon to the 1-27 CD3-Fc construct compared to a murine anti CD3 single-chain antibody was observed (FIG. 3).

### 4. Generation of Recombinant Transmembrane Fusion Proteins of the N-Terminal Amino Acids 1-27 of CD3 Epsilon from Different Non-Chimpanzee Primates Fused to EpCAM from Cynomolgus Monkey (1-27 CD3-EpCAM)

### 4.1. Cloning and Expression of 1-27 CD3-EpCAM

[0313] CD3 epsilon was isolated from different non-chimpanzee primates (marmoset, tamarin, squirrel monkey) and swine. The coding sequences of the 1-27 N-terminal amino acids of CD3 epsilon chain of the mature human, common marmoset (Callithrix jacchus), cottontop tamarin (Saguinus oedipus), common squirrel monkey (Saimiri sciureus) and domestic swine (Sus scrofa; used as negative control) fused to the N-terminus of Flag tagged cynomolgus EpCAM were obtained by gene synthesis according to standard protocols. cDNA sequence and amino acid sequence of the recombinant fusion proteins are listed under SEQ ID NOs 351 to 360). The gene synthesis fragments were designed as to contain first a BsrGI site to allow fusion in correct reading frame with the coding sequence of a 19 amino acid immunoglobulin leader peptide already present in the target expression vector, which is followed in frame by the coding sequence of the N-terminal 1-27 amino acids of the extracellular portion of the mature CD3 epsilon chains, which is followed in frame by the coding sequence of a Flag tag and followed in frame by the coding sequence of the mature cynomolgus EpCAM transmembrane protein (FIG. 4). The gene synthesis fragments were also designed to introduce a restriction site at the end of the cDNA coding for the fusion protein. The introduced restriction sites BsrGI at the 5′ end and SalI at the 3′ end, were utilized in the following cloning procedures. The gene synthesis fragments were then cloned via BsrGI and SalI into a derivative of the plasmid designated pEF DHFR (pEF-DHFR is described in Mack et al. Proc. Natl. Acad. Sci. USA 92 (1995) 7021-7025), which already contained the coding sequence of the 19 amino acid immunoglobulin leader peptide following standard protocols. Sequence verified plasmids were used to transiently transfect 293-HEK cells using the MATra-A Reagent (IBA GmbH, Göttingen, Germany) and 12 μg of plasmid DNA for adherent 293-HEK cells in 175 ml cell culture flasks according to the manufacturers protocol. After 3 days of cell culture the transfectants were tested for cell surface expression of the recombinant transmembrane protein via an FACS assay according to standard protocols. For that purpose a number of 2.5×10⁵ cells were incubated with the anti-Flag M2 antibody (Sigma-Aldrich Chemie GmbH, Taufkirchen, Germany) at 5 μg/ml in PBS with 2% FCS. Bound antibody was detected with an R-Phycoerythrin-conjugated affinity purified F(ab′)2 fragment, goat anti-mouse IgG, Fc-gamma fragment specific 1:100 in PBS with 2% FCS (Jackson ImmunoResearch Europe Ltd., Newmarket, Suffolk, UK). The samples were measured on a FACScalibur (BD biosciences, Heidelberg, Germany). Expression of the Flag tagged recombinant transmembrane fusion proteins consisting of cynomolgus EpCAM and the 1-27 N-terminal amino acids of the human, marmoset, tamarin, squirrel monkey and swine CD3 epsilon chain respectively on transfected cells was clearly detectable (FIG. 5).

### 4.2. Binding of Cross-Species Specific Anti-CD3 Single Chain Antibodies to the 1-27 CD3-EpCAM

[0314] Binding of crude preparations of periplasmatically expressed cross-species specific anti CD3 single-chain antibodies to the 1-27 N-terminal amino acids of the human, marmoset, tamarin and squirrel monkey CD3 epsilon chains respectively fused to cynomolgus Ep-CAM was tested in an FACS assay according to standard protocols. For that purpose a number of 2.5×10⁵ cells were incubated with crude preparations of periplasmatically expressed cross-species specific anti CD3 single-chain antibodies (preparation was performed as described above and according to standard protocols) and a single-chain murine anti-human CD3 antibody as negative control. As secondary antibody the Penta-His antibody (Qiagen GmbH, Hildesheim, Germany) was used at 5 μg/ml in 50 μl PBS with 2% FCS. The binding of the antibody was detected with an R-Phycoerythrin-conjugated affinity purified F(ab′)2 fragment, goat anti-mouse IgG, Fc-gamma fragment specific, diluted 1:100 in PBS with 2% FCS (Jackson ImmunoResearch Europe Ltd., Newmarket, Suffolk, UK). The samples were measured on a FACScalibur (BD biosciences, Heidelberg, Germany). As shown in FIGS. 6A-6E binding of single chain antibodies to the transfectants expressing the recombinant transmembrane fusion proteins consisting of the 1-27 N-terminal amino acids of CD3 epsilon of the human, marmoset, tamarin or squirrel monkey fused to cynomolgus EpCAM was observed. No binding of cross-species specific single chain antibodies was observed to a fusion protein consisting of the 1-27 N-terminal CD3 epsilon of swine fused to cynomolgus EpCAM used as negative control. Multi-primate cross-species specificity of the anti-CD3 single chain antibodies was shown. Signals obtained with the anti Flag M2 antibody and the cross-species specific single chain antibodies were comparable, indicating a strong binding activity of the cross-species specific single chain antibodies to the N-terminal amino acids 1-27 of CD3 epsilon.

### 5. Binding Analysis of Cross-Species Specific Anti-CD3 Single Chain Antibodies by Alanine-Scanning of Mouse Cells Transfected with the Human CD3 Epsilon Chain and its Alanine Mutants

### 5.1. Cloning and Expression of Human Wild-Type CD3 Epsilon

[0315] The coding sequence of the human CD3 epsilon chain was obtained by gene synthesis according to standard protocols (cDNA sequence and amino acid sequence of the human CD3 epsilon chain are listed under SEQ ID NOs 362 and 361). The gene synthesis fragment was designed as to contain a Kozak site for eukaryotic expression of the construct and restriction sites at the beginning and the end of the cDNA coding for human CD3 epsilon. The introduced restriction sites EcoRI at the 5′ end and SalI at the 3′ end, were utilized in the following cloning procedures. The gene synthesis fragment was then cloned via EcoRI and SalI into a plasmid designated pEF NEO following standard protocols. pEF NEO was derived of pEF DHFR (Mack et al. Proc. Natl. Acad. Sci. USA 92 (1995) 7021-7025) by replacing the cDNA of the DHFR with the cDNA of the neomycin resistance by conventional molecular cloning. A sequence verified plasmid was used to transfect the murine T cell line EL4 (ATCC No. TIB-39) cultivated in RPMI with stabilized L-glutamine supplemented with 10% FCS, 1% penicillin/streptomycin, 1% HEPES, 1% pyruvate, 1% non-essential amino acids (all Biochrom AG Berlin, Germany) at 37° C., 95% humidity and 7% CO₂. Transfection was performed with the SuperFect Transfection Reagent (Qiagen GmbH, Hilden, Germany) and 2 μg of plasmid DNA according to the manufacturer's protocol. After 24 hours the cells were washed with PBS and cultivated again in the aforementioned cell culture medium with 600 μg/ml G418 for selection (PAA Laboratories GmbH, Pasching, Austria). 16 to 20 days after transfection the outgrowth of resistant cells was observed. After additional 7 to 14 days cells were tested for expression of human CD3 epsilon by FACS analysis according to standard protocols. 2.5×10⁵ cells were incubated with anti-human CD3 antibody UCHT-1 (BD biosciences, Heidelberg, Germany) at 5 μg/ml in PBS with 2% FCS. The binding of the antibody was detected with an R-Phycoerythrin-conjugated affinity purified F(ab′)2 fragment, goat anti-mouse IgG, Fc-gamma fragment specific, diluted 1:100 in PBS with 2% FCS (Jackson ImmunoResearch Europe Ltd., Newmarket, Suffolk, UK). The samples were measured on a FACSCalibur (BD biosciences, Heidelberg, Germany). Expression of human wild-type CD3 on transfected EL4 cells is shown in FIG. 7.

### 5.2. Cloning and Expression of the Cross-Species Specific Anti-CD3 Single Chain Antibodies as IgG1 Antibodies

[0316] In order to provide improved means of detection of binding of the cross-species specific single chain anti-CD3 antibodies H2C HLP, A2J HLP and E2M HLP were converted into IgG1 antibodies with murine IgG1 and human lambda constant regions. cDNA sequences coding for the heavy and light chains of respective IgG antibodies were obtained by gene synthesis according to standard protocols. The gene synthesis fragments for each specificity were designed as to contain first a Kozak site to allow eukaryotic expression of the construct, which is followed by an 19 amino acid immunoglobulin leader peptide (SEQ ID NOs 364 and 363), which is followed in frame by the coding sequence of the respective heavy chain variable region or respective light chain variable region, followed in frame by the coding sequence of the heavy chain constant region of murine IgG1 (SEQ ID NOs 366 and 365) or the coding sequence of the human lambda light chain constant region (SEQ ID NO 368 and 367), respectively. Restriction sites were introduced at the beginning and the end of the cDNA coding for the fusion protein. Restriction sites EcoRI at the 5′ end and SalI at the 3′ end were used for the following cloning procedures. The gene synthesis fragments were cloned via EcoRI and SalI into a plasmid designated pEF DHFR (Mack et al. Proc. Natl. Acad. Sci. USA 92 (1995) 7021-7025) for the heavy chain constructs and pEF ADA (pEF ADA is described in Raum et al., Cancer Immunol Immunother., 50(3), (2001), 141-50) for the light chain constructs) according to standard protocols. Sequence verified plasmids were used for co-transfection of respective light and heavy chain constructs in the FreeStyle 293 Expression System (Invitrogen GmbH, Karlsruhe, Germany) according to the manufacturers protocol. After 3 days cell culture supernatants of the transfectants were harvested and used for the alanine-scanning experiment.

### 5.3. Cloning and Expression of Alanine Mutants of Human CD3 Epsilon for Alanine-Scanning

[0317] 27 cDNA fragments coding for the human CD3 epsilon chain with an exchange of one codon of the wild-type sequence of human CD3 epsilon into a codon coding for alanine (GCC) for each amino acid of amino acids 1-27 of the extracellular domain of the mature human CD3 epsilon chain respectively were obtained by gene synthesis. Except for the exchanged codon the cDNA fragments were identical to the aforementioned human wild-type CD3 cDNA fragment. Only one codon was replaced in each construct compared to the human wild-type CD3 cDNA fragment described above. Restriction sites EcoRI and SalI were introduced into the cDNA fragments at identical positions compared to the wild-type construct. All alanine-scanning constructs were cloned into pEF NEO and sequence verified plasmids were transfected into EL4 cells. Transfection and selection of transfectants was performed as described above. As result a panel of expressed constructs was obtained wherein the first amino acid of the human CD3 epsilon chain, glutamine (Q, Gln) at position 1 was replaced by alanine. The last amino acid replaced by alanine was the threonine (T, Thr) at position 27 of mature human wild-type CD3 epsilon. For each amino acid between glutamine 1 and threonine 27 respective transfectants with an exchange of the wild-type amino acid into alanine were generated.

### 5.4. Alanine-Scanning Experiment

[0318] Chimeric IgG antibodies as described in 2) and cross-species specific single chain antibodies specific for CD3 epsilon were tested in alanine-scanning experiment. Binding of the antibodies to the EL4 cell lines transfected with the alanine-mutant constructs of human CD3 epsilon as described in 3) was tested by FACS assay according to standard protocols. 2.5×10⁵ cells of the respective transfectants were incubated with 50 μl of cell culture supernatant containing the chimeric IgG antibodies or with 50 μl of crude preparations of periplasmatically expressed single-chain antibodies. For samples incubated with crude preparations of periplasmatically expressed single-chain antibodies the anti-Flag M2 antibody (Sigma-Aldrich Chemie GmbH, Taufkirchen, Germany) was used as secondary antibody at 5 μg/ml in 50 μl PBS with 2% FCS. For samples incubated with the chimeric IgG antibodies a secondary antibody was not necessary. For all samples the binding of the antibody molecules was detected with an R-Phycoerythrin-conjugated affinity purified F(ab′)2 fragment, goat anti-mouse IgG, Fc-gamma fragment specific, diluted 1:100 in PBS with 2% FCS (Jackson ImmunoResearch Europe Ltd., Newmarket, Suffolk, UK). Samples were measured on a FACSCalibur (BD biosciences, Heidelberg, Germany). Differential binding of chimeric IgG molecules or cross-species specific single-chain antibodies to the EL4 cell lines transfected with the alanine-mutants of human CD3 epsilon was detected. As negative control either an isotype control or a crude preparation of a periplasmatically expressed single-chain antibody of irrelevant specificity was used respectively. UCHT-1 antibody was used as positive control for the expression level of the alanine-mutants of human CD3 epsilon. The EL4 cell lines transfected with the alanine-mutants for the amino acids tyrosine at position 15, valine at position 17, isoleucine at position 19, valine at position 24 or leucine at position 26 of the mature CD3 epsilon chain were not evaluated due to very low expression levels (data not shown). Binding of the cross-species specific single chain antibodies and the single chain antibodies in chimeric IgG format to the EL4 cell lines transfected with the alanine-mutants of human CD3 epsilon is shown in FIGS. 8A-8D as relative binding in arbitrary units with the geometric mean fluorescence values of the respective negative controls subtracted from all respective geometric mean fluorescence sample values. To compensate for different expression levels all sample values for a certain transfectant were then divided through the geometric mean fluorescence value of the UCHT-1 antibody for the respective transfectant. For comparison with the wild-type sample value of a specificity all sample values of the respective specificity were finally divided through the wild-type sample value, thereby setting the wild-type sample value to 1 arbitrary unit of binding.

[0319] The calculations used are shown in detail in the following formula:

$$value\_Sample ( x , y ) = \frac{Sample ( x , y ) - neg\_Contr . ( x )}{\begin{matrix}( UCHT - 1 ( x ) - neg\_Contr . ( x ) ) * \\ \frac{WT ( y ) - neg\_Contr . ( wt )}{UCHT - 1 ( wt ) - neg\_Contr . ( wt )}\end{matrix}}$$

[0320] In this equation value_Sample means the value in arbitrary units of binding depicting the degree of binding of a specific anti-CD3 antibody to a specific alanine-mutant as shown in FIGS. 8A-8D, Sample means the geometric mean fluorescence value obtained for a specific anti-CD3 antibody assayed on a specific alanine-scanning transfectant, neg_Contr. means the geometric mean fluorescence value obtained for the negative control assayed on a specific alanine-mutant, UCHT-1 means the geometric mean fluorescence value obtained for the UCHT-1 antibody assayed on a specific alanine-mutant, WT means the geometric mean fluorescence value obtained for a specific anti-CD3 antibody assayed on the wild-type transfectant, x specifies the respective transfectant, y specifies the respective anti-CD3 antibody and wt specifies that the respective transfectant is the wild-type.

[0321] As can be seen in FIGS. 8A-8D the IgG antibody A2J HLP showed a pronounced loss of binding for the amino acids asparagine at position 4, threonine at position 23 and isoleucine at position 25 of the mature CD3 epsilon chain. A complete loss of binding of IgG antibody A2J HLP was observed for the amino acids glutamine at position 1, aspartate at position 2, glycine at position 3 and glutamate at position 5 of the mature CD3 epsilon chain. IgG antibody E2M HLP showed a pronounced loss of binding for the amino acids asparagine at position 4, threonine at position 23 and isoleucine at position 25 of the mature CD3 epsilon chain. IgG antibody E2M HLP showed a complete loss of binding for the amino acids glutamine at position 1, aspartate at position 2, glycine at position 3 and glutamate at position 5 of the mature CD3 epsilon chain. IgG antibody H2C HLP showed an intermediate loss of binding for the amino acid asparagine at position 4 of the mature CD3 epsilon chain and it showed a complete loss of binding for the amino acids glutamine at position 1, aspartate at position 2, glycine at position 3 and glutamate at position 5 of the mature CD3 epsilon chain. Single chain antibody F12Q HLP showed an essentially complete loss of binding for the amino acids glutamine at position 1, aspartate at position 2, glycine at position 3 of the mature CD3 epsilon chain and glutamate at position 5 of the mature CD3 epsilon chain.

### 6. Binding Analysis of the Cross-Species Specific Anti-CD3 Binding Molecule H2C HLP to the Human CD3 Epsilon Chain with and without N-Terminal His6 Tag Transfected into the Murine T Cell Line EL4

[0322] 6.1. Cloning and Expression of the Human CD3 Epsilon Chain with N-Terminal Six Histidine Tag (His6 Tag)

[0323] A cDNA fragment coding for the human CD3 epsilon chain with a N-terminal His6 tag was obtained by gene synthesis. The gene synthesis fragment was designed as to contain first a Kozak site for eukaryotic expression of the construct, which is followed in frame by the coding sequence of a 19 amino acid immunoglobulin leader peptide, which is followed in frame by the coding sequence of a His6 tag which is followed in frame by the coding sequence of the mature human CD3 epsilon chain (the cDNA and amino acid sequences of the construct are listed as SEQ ID NOs 380 and 379). The gene synthesis fragment was also designed as to contain restriction sites at the beginning and the end of the cDNA. The introduced restriction sites EcoRI at the 5′ end and SalI at the 3′ end, were used in the following cloning procedures. The gene synthesis fragment was then cloned via EcoRI and SalI into a plasmid designated pEF-NEO (as described above) following standard protocols. A sequence verified plasmid was used to transfect the murine T cell line EL4. Transfection and selection of the transfectants were performed as described above. After 34 days of cell culture the transfectants were used for the assay described below.

6.2. Binding of the Cross-Species Specific Anti-CD3 Binding Molecule H2C HLP to the Human CD3 Epsilon Chain with and without N-Terminal His6 Tag

[0324] A chimeric IgG antibody with the binding specificity H2C HLP specific for CD3 epsilon was tested for binding to human CD3 epsilon with and without N-terminal His6 tag. Binding of the antibody to the EL4 cell lines transfected the His6-human CD3 epsilon and wild-type human CD3 epsilon respectively was tested by an FACS assay according to standard protocols. 2.5×10⁵ cells of the transfectants were incubated with 50 μl of cell culture supernatant containing the chimeric IgG antibody or 50 μl of the respective control antibodies at 5 μg/ml in PBS with 2% FCS. As negative control an appropriate isotype control and as positive control for expression of the constructs the CD3 specific antibody UCHT-1 were used respectively. The binding of the antibodies was detected with a R-Phycoerythrin-conjugated affinity purified F(ab′)2 fragment, goat anti-mouse IgG, Fc-gamma fragment specific, diluted 1:100 in PBS with 2% FCS (Jackson ImmunoResearch Europe Ltd., Newmarket, Suffolk, UK). Samples were measured on a FACSCalibur (BD biosciences, Heidelberg, Germany). Compared to the EL4 cell line transfected with wild-type human CD3 epsilon a clear loss of binding of the chimeric IgG with binding specificity H2C HLP to human-CD3 epsilon with an N-terminal His6 tag was detected. These results showed that a free N-terminus of CD3 epsilon is essential for binding of the cross-species specific anti-CD3 binding specificity H2C HLP to the human CD3 epsilon chain (FIG. 9).

### 7. Determination of the Binding Constant KD of Bispecific Single Chain Antibody Cross-Species Specific for Primate EGFR and Primate CD3 (EGFR LH×H2C HLP) to the Fusion Protein 1-27 CD3-Fc by Plasmon Surface Resonance Measurement Compared to Binding to CD3 Expressing PBMC Measured by a Fluorescence Activated Cell Sorter (FACS)

### 7.1. Plasmon Surface Resonance Measurement

[0325] To determine the binding affinity of the fully cross-species specific bispecific single chain antibody EGFR-21-63 LH×H2C HLP to amino acids 1-27 of the N-terminus of the human CD3 epsilon chain a Surface Plasmon Resonance measurement was performed with a recombinant fusion protein consisting of the N-terminal amino acids 1-27 of the mature human CD3 epsilon chain fused to a Fc-part of human IgG1 (1-27 CD3-Fc). To this end a Biacore Carboxymethyl-Dextran CM5 chip (Biacore, Uppsala, Sweden) was installed on a Biacore 2000® system (Biacore, Uppsala, Sweden). One flow cell was activated by a N-(3-Dimethylaminopropyl)-N-ethylcarbodiimide hydrochloride/N-Hydroxysuccinimide solution according to standard procedures. A solution of the fusion protein 1-27 CD3-Fc was added afterwards resulting in stable covalent linkage of the protein to the dextran layer of the Biacore chip. Unbound protein was removed by extensive washing followed by blocking of unreacted remaining NHS-activated carboxy groups by adding an ethanolamine solution. Success of protein coupling was confirmed by a higher signal measured as Response Units compared to the signal prior to coupling. A reference cell was prepared as described but without adding a protein solution.

[0326] Purified bispecific antibody EGFR-21-63 LH×H2C HLP was extensively dialyzed against HBS-EP buffer (Biacore, Uppsala, Sweden) in a Slide-A-Lyzer® Mini Dialysis Unit (Pierce, Rockford-Ill., USA). Protein concentration after dialysis was determined by UV280 nm absorption resulting in a concentration of 43 μg/ml.

[0327] The protein solution was transferred into a 96 well plate and serially diluted with HBS-EP buffer at a 1:1 ratio to 10 further wells.

[0328] Surface Plasmon Resonance Measurements were done by separately sampling all 11 wells. The flow cells were regenerated with acetate buffer between measurements to release bound protein.

[0329] Binding signals of bispecific antibody molecules were obtained by subtraction of the signal of the reference cell from the signal of the measurement cell conjugated with the 1-27 CD3-Fc protein. Association and dissociation curves were measured as Response Units and recorded. The binding constants were calculated using the Biacore® curve fitting software based on the Langmuir model.

[0330] The calculated binding constant KD over the first five concentrations was determined to be 1.52×10⁻⁷ M.

### 7.2. Determination of CD3 Binding Constant by FACS Measurement

[0331] In order to test the affinity of the cross-species specific bispecific antibody molecules with regard to the binding strength to native human CD3, an additional saturation FACS binding analysis was performed. The chosen bispecific antibody molecule EGFR-21-63 LH×H2C HLP was used to set up a dilution row with a factor of 1:1.5 and a starting concentration of 63.3 μg/ml. The bispecific antibody molecule was incubated at these different concentrations with 1.25×10⁵ human PBMCs each for 1 hour a 4° C. followed by two washing steps in PBS at 4° C. The detection of the bound bispecific antibody molecules was carried out by using a Penta-His antibody (Qiagen GmbH, Hildesheim, Germany) at 5 μg/ml in 50 μl PBS with 2% FCS. After incubation for 45 minutes at 4° C. and two washing steps the binding of the Penta-His antibody was detected with an R-Phycoerythrin-conjugated affinity purified F(ab′)2 fragment, goat anti-mouse IgG, Fc-gamma fragment specific, diluted 1:100 in PBS with 2% FCS (Jackson ImmunoResearch Europe Ltd., Newmarket, Suffolk, UK). Flow cytometry was performed on a FACS-Canto II apparatus, the FACS Diva software was used to acquire and analyze the data (Becton Dickinson biosciences, Heidelberg). FACS staining and measuring of the fluorescence intensity were performed as described in Current Protocols in Immunology (Coligan, Kruisbeek, Margulies, Shevach and Strober, Wiley-Interscience, 2002). The acquired fluorescence intensity mean values were plotted as a function of the used bispecific antibody molecule concentration and analyzed by the biomathematical software Prism in a one side binding analysis (hyperbola). The software calculated the corresponding KD value that described the binding of a ligand (the bispecific antibody molecule) to a receptor (the CD3 positive PBMC subfraction) that follows the law of mass action. The underlying formula is as follows: Y=Bmax×X/(Kd+X) with Bmax being the maximal binding. KD is the concentration of ligand required to reach half-maximal binding. The FACS staining was carried out in duplicates, the R² values were better than 0.95.

[0332] The determined half-maximal binding for the bispecific antibody molecule EGFR-21-63 LH×H2C HLP was reached at a concentration of 8472 ng/ml which corresponds to 154 nM (1.54×10⁻⁷ M) at a given molecular mass of 55000 Dalton (FIG. 10).

[0333] Thus, the affinity of EGFR-21-63 LH×H2C HLP to the N-terminal amino acids 1-27 of the human CD3 epsilon chain separated from their native CD3-context proved to be equal to the affinity of EGFR-21-63 LH×H2C HLP to native CD3 on intact T cells.

### 8. Generation of CHO Cells Transfected with Human EGFR

[0334] The cell line positive for human EGFR, A431 (epidermoid carcinoma cell line, CRL-1555, American Type Culture Collection, Rockville, Md.) was used to obtain the total RNA that was isolated according to the instructions of the kit manual (Qiagen, RNeasy Mini Kit, Hilden, Germany). The obtained RNA was used for cDNA synthesis by random-primed reverse transcription. For cloning of the full length sequence of the human EGFR antigen the following oligonucleotides were used:

5′ EGFR AG XbaI
5′-GGTCTAGAGCATGCGACCCTCCGGGACGGCCGGG-3′
3′ EGFR AG SalI
5′-TTTTAAGTCGACTCATGCTCCAATAAATTCACTGCT-3′

[0335] The coding sequence was amplified by PCR (denaturation at 94° C. for 5 min, annealing at 58° C. for 1 min, elongation at 72° C. for 2 min for the first cycle; denaturation at 94° C. for 1 min, annealing at 58° C. for 1 min, elongation at 72° C. for 2 min for 30 cycles; terminal extension at 72° C. for 5 min). The PCR product was subsequently digested with XbaI and SalI, ligated into the appropriately digested expression vector pEF-DHFR (Raum et al., Cancer Immunol. Immunother. 2001; 50: 141-150), and transformed into E. coli. The afore-mentioned procedures were carried out according to standard protocols (Sambrook, Molecular Cloning; A Laboratory Manual, 3rd edition, Cold Spring Harbour Laboratory Press, Cold Spring Harbour, N.Y. (2001)). A clone with sequence-verified nucleotide sequence (SEQ ID 370, Amino acid sequence SEQ ID 369) was transfected into DHFR deficient CHO cells for eukaryotic expression of the construct. Eukaryotic protein expression in DHFR deficient CHO cells was performed as described by Kaufmann R. J. (1990) Methods Enzymol. 185, 537-566. Gene amplification of the construct was induced by increasing concentrations of methothrexate (MTX) to a final concentration of up to 20 nM MTX.

### 9. Generation of CHO Cells Expressing the Extracellular Domain of Cynomolgus EGFR

[0336] The cDNA sequence of the extracellular domain of cynomolgus EGFR was obtained by a set of two PCRs on cynomolgus monkey colon cDNA (Cat#: C1534090-Cy-BC; obtained from BioCat GmbH, Heidelberg, Germany) using the following reaction conditions: 1 cycle at 94° C. for 3 minutes followed by 35 cycles with 94° C. for 1 minute, 53° C. for 1 minute and 72° C. for 2 minutes followed by a terminal cycle of 72° C. for 3 minutes. The following primers were used:

1.
forward primer:
5′-CGCTCTGCCCGGCGAGTCGGGC-3′
reverse primer:
5′-CCGTCTTCCTCCATCTCATAGC-3′
2.
forward primer:
5′-ACATCCGGAGGTGACAGATCACGGCTCGTGC-3′
reverse primer:
5′-CAGGATATCCGAACGATGTGGCGCCTTCGC-3′

[0337] Those PCRs generated two overlapping fragments (A: 1-869, B: 848-1923), which were isolated and sequenced according to standard protocols using the PCR primers, and thereby provided a 1923 bp portion of the cDNA sequence of cynomolgus EGFR from the third nucleotide of codon +1 of the mature protein to the 21^{st} codon of the transmembrane domain. To generate a construct for expression of cynomolgus EGFR a cDNA fragment was obtained by gene synthesis according to standard protocols (the cDNA and amino acid sequence of the construct is listed under SEQ ID Nos 372 and 371). In this construct the coding sequence for cynomolgus EGFR from amino acid +2 to +641 of the mature EGFR protein was fused into the coding sequence of human EGFR replacing the coding sequence of the amino acids +2 to +641. The gene synthesis fragment was also designed as to contain a Kozak site for eukaryotic expression of the construct and restriction sites at the beginning and the end of the cDNA coding for essentially the extracellular domain of cynomolgus EGFR fused to the transmembrane and intracellular domains of human EGFR. Furthermore a conservative mutation was introduced at amino acid 627 (4^{th} amino acid of the transmembrane domain) mutating valine into leucine to generate a restriction site (SphI) for cloning purposes. The introduced restriction sites XbaI at the 5′ end and SalI at the 3′ end, were utilised in the following cloning procedures. The gene synthesis fragment was then cloned via XbaI and SalI into a plasmid designated pEF-DHFR (pEF-DHFR is described in Mack et al. Proc. Natl. Acad. Sci. USA 92 (1995) 7021-7025). A sequence verified clone of this plasmid was used to transfect CHO/dhfr− cells as described above.

### 10. Generation of EGFR and CD3 Cross-Species Specific Bispecific Single Chain Molecules

### 10.1. Cloning of Cross-Species Specific Binding Molecules

[0338] Generally, bispecific single chain antibody molecules, each comprising a domain with a binding specificity cross-species specific for human and non-chimpanzee primate CD3epsilon as well as a domain with a binding specificity cross-species specific for human and non-chimpanzee primate EGFR, were designed as set out in the following Table 1:

TABLE 1
Formats of anti-CD3 and anti-EGFR cross-species
specific bispecific single chain antibody molecules

| SEQ ID | Formats of protein constructs |
|---|---|
| (nucl/prot) | (N → C) |
| 294/293 | EGFR-21-63 LH × H2C HL |
| 296/295 | EGFR-21-63 LH × H2C HLP |
| 302/301 | EGFR-21-63 LH × A2J HLP |
| 298/297 | EGFR-21-63 LH × H1E HLP |
| 306/305 | EGFR-21-63 LH × E2M HLP |
| 308/307 | EGFR-21-63 LH × F7O HLP |
| 390/389 | EGFR1 HL × I2C HL |
| 392/391 | EGFR1 LH × I2C HL |
| 394/393 | EGFR1 HL × F12Q HL |
| 396/395 | EGFR1 LH × F12Q HL |
| 398/397 | EGFR1 HL × H2C HL |
| 400/399 | EGFR1 LH × H2C HL |
| 448/447 | EGFR1 HL × H2C HL |
| 450/449 | EGFR1 HL × F12Q LH |
| 452/451 | EGFR1 HL × I2C HL |
| 410/409 | EGFR2 HL × I2C HL |
| 412/411 | EGFR2 LH × I2C HL |
| 414/413 | EGFR2 HL × F12Q HL |
| 416/415 | EGFR2 LH × F12Q HL |
| 418/417 | EGFR2 HL × H2C HL |
| 420/419 | EGFR2 LH × H2C HL |

[0339] The aforementioned constructs containing the variable light-chain (L) and variable heavy-chain (H) domains cross-species specific for human and cynomolgus EGFR were obtained by gene synthesis. The gene synthesis fragments were designed as to contain first a Kozak site for eukaryotic expression of the construct, followed by a 19 amino acid immunoglobulin leader peptide, followed in frame by the coding sequence of the respective bispecific single chain antibody molecule, followed in frame by the coding sequence of a 6 histidine tag and a stop codon. The gene synthesis fragment was also designed as to introduce suitable N- and C-terminal restriction sites. The gene synthesis fragment was cloned via these restriction sites into a plasmid designated pEF-DHFR (pEF-DHFR is described in Raum et al. Cancer Immunol Immunother 50 (2001) 141-150) according to standard protocols (Sambrook, Molecular Cloning; A Laboratory Manual, 3rd edition, Cold Spring Harbour Laboratory Press, Cold Spring Harbour, N.Y. (2001)). A clone with sequence-verified nucleotide sequence was transfected into dihydrofolate reductase (DHFR) deficient Chinese hamster ovary (CHO) cells for eukaryotic expression of the construct.

[0340] The constructs were transfected stably or transiently into DHFR-deficient CHO-cells (ATCC No. CRL 9096) by electroporation or alternatively into HEK 293 (human embryonal kidney cells, ATCC Number: CRL-1573) in a transient manner according to standard protocols.

### 10.2. Expression and Purification of the Bispecific Single Chain Antibody Molecules

[0341] The bispecific single chain antibody molecules were expressed in chinese hamster ovary cells (CHO). Eukaryotic protein expression in DHFR deficient CHO cells was performed as described by Kaufmann R. J. (1990) Methods Enzymol. 185, 537-566. Gene amplification of the constructs was induced by increasing final concentrations of MTX up to 20 nM. After two passages of stationary culture the cells were grown in roller bottles with nucleoside-free HyQ PF CHO liquid soy medium (with 4.0 mM L-Glutamine with 0.1% Pluronic F-68; HyClone) for 7 days before harvest. The cells were removed by centrifugation and the supernatant containing the expressed protein was stored at −20° C. Alternatively, constructs were transiently expressed in HEK 293 cells. Transfection was performed with 293fectin reagent (Invitrogen, #12347-019) according to the manufacturer's protocol.

[0342] Äkta® Explorer System (GE Health Systems) and Unicorn® Software were used for chromatography. Immobilized metal affinity chromatography (“IMAC”) was performed using a Fractogel EMD Chelate® (Merck) which was loaded with ZnCl2 according to the protocol provided by the manufacturer. The column was equilibrated with buffer A (20 mM sodium phosphate buffer pH 7.2, 0.1 M NaCl) and the cell culture supernatant (500 ml) was applied to the column (10 ml) at a flow rate of 3 ml/min. The column was washed with buffer A to remove unbound sample. Bound protein was eluted using a two step gradient of buffer B (20 mM sodium phosphate buffer pH 7.2, 0.1 M NaCl, 0.5 M Imidazol) according to the following:

[0343] Step 1: 20% buffer B in 6 column volumes

[0344] Step 2: 100% buffer B in 6 column volumes

[0345] Eluted protein fractions from step 2 were pooled for further purification. All chemicals were of research grade and purchased from Sigma (Deisenhofen) or Merck (Darmstadt).

[0346] Gel filtration chromatography was performed on a HiLoad 16/60 Superdex 200 prep grade column (GE/Amersham) equilibrated with Equi-buffer (25 mM Citrat, 200 mM Lysin, 5% Glycerol, pH 7.2). Eluted protein samples (flow rate 1 ml/min) were subjected to standard SDS-PAGE and Western Blot for detection. Prior to purification, the column was calibrated for molecular weight determination (molecular weight marker kit, Sigma MW GF-200). Protein concentrations were determined using OD280 nm.

[0347] Purified bispecific single chain antibody protein was analyzed in SDS PAGE under reducing conditions performed with pre-cast 4-12% Bis Tris gels (Invitrogen). Sample preparation and application were performed according to the protocol provided by the manufacturer. The molecular weight was determined with MultiMark protein standard (Invitrogen). The gel was stained with colloidal Coomassie (Invitrogen protocol). The purity of the isolated protein was >95% as determined by SDS-PAGE.

[0348] The bispecific single chain antibody has a molecular weight of about 52 kDa under native conditions as determined by gel filtration in PBS. All constructs were purified according to this method.

[0349] Western Blot was performed using an Optitran® BA-S83 membrane and the Invitrogen Blot Module according to the protocol provided by the manufacturer. The antibodies used were directed against the His Tag (Penta His, Qiagen) and Goat-anti-mouse Ig labeled with alkaline phosphatase (AP) (Sigma), and BCIP/NBT (Sigma) as substrate. A single band was detected at 52 kD corresponding to the purified bispecific single chain antibody.

### 11. Determination of the Binding Constant KD of Fully Cross-Species Specific Bispecific Single Chain Antibodies to the Fusion Protein 1-27 CD3-Fc by Surface Plasmon Resonance Measurement

[0350] To determine the binding affinities of bispecific single chain antibody molecules cross-species specific to primate EGFR and primate CD3 to the amino acids 1-27 of the N-terminus of the mature human CD3 epsilon chain a Surface Plasmon Resonance measurement was performed with a recombinant fusion protein consisting of the N-terminal amino acids 1-27 of the human CD3 epsilon chain fused to a Fc-part of human IgG1 (1-27 CD3-Fc). To this end a Biacore Carboxymethyl-Dextran CM5 chip (Biacore, Uppsala, Sweden) was installed on a Biacore 2000® system (Biacore, Uppsala, Sweden). A flow cell was activated by a N-(3-Dimethylaminopropyl)-N′-ethylcarbodiimide hydrochloride/N-Hydroxysuccinimide solution according to standard procedures. A solution of the fusion protein 1-27 CD3-Fc was added afterwards resulting in stable covalent linkage of the protein to the dextran layer of the Biacore chip. Unbound protein was removed by extensive washing followed by blocking of remaining unreacted NHS-activated carboxy groups by adding an ethanolamine solution. Success of protein coupling was confirmed by detection of a higher signal measured as Response Units compared to the signal prior to coupling. A reference cell was prepared as described but without adding the protein solution.

[0351] Purified bispecific single chain antibodies listed below were adjusted to 5 μg/ml with HBS-EP buffer (Biacore, Uppsala, Sweden) and transferred into a 96 well plate each at a volume of 150 μl.

[0352] Surface Plasmon Resonance Measurements were performed for all samples and the flow cells were regenerated with acetate buffer between measurements to release bound protein (all according to standard protocols).

[0353] Binding signals of the bispecific single chain antibodies were obtained by subtraction of the signal of the reference cell from the signal of the measurement cell conjugated with the 1-27 CD3-Fc protein.

[0354] Association and dissociation curves were measured as Response Units and recorded. The binding constants were calculated using the Biacore® curve-fitting software based on the Langmuir model. The calculated affinities for the tested fully cross-species specific bispecific single chain molecules to the N-terminal amino acids 1-27 of the human CD3 epsilon are given as KD values below and range from 2.54×10⁻⁶ M to 2.49×10⁻⁷ M. “LH” refers to an arrangement of variable domains in the order VL-VH. “HL” refers to an arrangement of variable domains in the order VH-VL. G4H, F70, A2J, E1L, E2M, H1E and F6A refer to different cross-species specific CD3 binding molecules.

| Bispecific antibody molecule | KD(M) |
|---|---|
| EGFR LH × F7O HLP | 1.01 × 10⁻⁶ |
| EGFR LH × A2J HLP | 2.49 × 10⁻⁷ |
| EGFR LH × E2M HLP | 2.46 × 10⁻⁶ |
| EGFR LH × H1E HLP | 2.54 × 10⁻⁶ |

### 12. Flow Cytometric Binding Analysis of the EGFR and CD3 Cross-Species Specific Bispecific Antibodies

[0355] In order to test the functionality of the cross-species specific bispecific antibody constructs with regard to binding capability to human and cynomolgus EGFR and CD3, respectively, a FACS analysis was performed. For this purpose CHO cells transfected with human EGFR as described in Example 8 and human CD3 positive T cell leukemia cell line HPB-ALL (DSMZ, Braunschweig, ACC483) were used to test the binding to human antigens. The binding reactivity to cynomolgus antigens was tested by using the generated cynomolgus EGFR transfectant described in Example 9 and a macaque T cell line 4119LnPx (kindly provided by Prof Fickenscher, Hygiene Institute, Virology, Erlangen-Nuernberg; published in Knappe A, et al., and Fickenscher H., Blood 2000, 95, 3256-61) 200.000 cells of the respective cell population were incubated for 30 min on ice with 50 μl of the purified protein of the cross-species specific bispecific antibody constructs (2 μg/ml). Alternatively, the cell culture supernatant of transiently produced proteins was used. The cells were washed twice in PBS and binding of the construct was detected with a murine Penta His antibody (Qiagen; diluted 1:20 in 50 μl PBS with 2% FCS). After washing, bound anti His antibodies were detected with an Fc gamma-specific antibody (Dianova) conjugated to phycoerythrin, diluted 1:100 in PBS with 2% FCS. Fresh culture medium was used as a negative control.

[0356] Flow cytometry was performed on a FACS-Calibur apparatus, the CellQuest software was used to acquire and analyze the data (Becton Dickinson biosciences, Heidelberg). FACS staining and measuring of the fluorescence intensity were performed as described in Current Protocols in Immunology (Coligan, Kruisbeek, Margulies, Shevach and Strober, Wiley-Interscience, 2002).

[0357] The binding ability of several bispecific single chain molecules which are specific for EGFR and cross-species specific for human and non-chimpanzee primate CD3 were clearly detectable as shown in FIGS. 11A-11D. In the FACS analysis, all constructs showed binding to CD3 and EGFR compared to culture medium and first and second detection antibody as the negative controls. Cross-species specificity of the bispecific antibody to human and cynomolgus CD3 and EGFR antigens was demonstrated.

### 13. Bioactivity of EGFR and CD3 Cross-Species Specific Bispecific Single Chain Antibodies

[0358] Bioactivity of the generated bispecific single chain antibodies was analyzed by chromium 51 (⁵¹Cr) release in vitro cytotoxicity assays using the EGFR positive cell lines described in Examples 8 and 9. As effector cells stimulated human CD8 positive T cells or the macaque T cell line 4119LnPx were used, respectively.

[0359] Generation of the stimulated CD8+ T cells was performed as follows:

[0360] A Petri dish (145 mm diameter, Greiner) was pre-coated with a commercially available anti-CD3 specific antibody in a final concentration of 1 μg/ml for 1 hour at 37° C. Unbound protein was removed by one washing step with PBS. The fresh PBMC's were isolated from peripheral blood (30-50 ml human blood) by Ficoll gradient centrifugation according to standard protocols. 3-5×10⁷ PBMCs were added to the precoated petri dish in 120 ml of RPMI 1640/10% FCS/IL-2 20 U/ml (Proleukin, Chiron) and stimulated for 2 days. At the third day the cells were collected, washed once with RPMI 1640. IL-2 was added to a final concentration of 20 U/ml and cultivated again for one day. CD8+ cytotoxic T lymphocytes (CTLs) were isolated by depletion of CD4+ T cells and CD56+ NK cells.

[0361] Target cells were washed twice with PBS and labeled with 11.1 MBq ⁵¹Cr in a final volume of 100 μl RPMI with 50% FCS for 45 minutes at 37° C. Subsequently the labeled target cells were washed 3 times with 5 ml RPMI and then used in the cytotoxicity assay. The assay was performed in a 96 well plate in a total volume of 250 μl supplemented RPMI (as above) with an E:T ratio of 10:1. 1 μg/ml of the cross-species specific bispecific single chain antibody molecules and 20 threefold dilutions thereof were applied. Alternatively cell culture supernatant of transiently produced proteins was serially diluted in 1:2 steps. The assay time is 18 hours and cytotoxicity was measured as relative values of released chromium in the supernatant related to the difference of maximum lysis (addition of Triton-X) and spontaneous lysis (without effector cells). All measurements were done in quadruplicates. Measurement of chromium activity in the supernatants was performed with a Wizard 3″ gammacounter (Perkin Elmer Life Sciences GmbH, Köln, Germany). Analysis of the experimental data was performed with Prism 4 for Windows (version 4.02, GraphPad Software Inc., San Diego, Calif., USA). Sigmoidal dose response curves typically had R² values >0.90 as determined by the software. EC₅₀ values calculated by the analysis program were used for comparison of bioactivity.

[0362] As shown in FIGS. 12A-12H and 13A-13B, all of the generated cross-species specific bispecific single chain antibody constructs revealed cytotoxic activity against human EGFR positive target cells elicited by human CD8+ cells and cynomolgus EGFR positive target cells elicited by the macaque T cell line 4119LnPx. A bispecific single chain antibody with different target specificity was used as negative control.

### 14. Cloning and Expression of the C-Terminal, Transmembrane and Truncated Extracellular Domains of Human MCSP

[0363] The coding sequence of the C-terminal, transmembrane and truncated extracellular domain of human MCSP (amino acids 1538-2322) was obtained by gene synthesis according to standard protocols (cDNA sequence and amino acid sequence of the recombinant construct for expression of the C-terminal, transmembrane and truncated extracellular domain of human MCSP (designated as human D3) are listed under SEQ ID NOs 374 and 373). The gene synthesis fragment was designed as to contain first a Kozak site to allow eukaryotic expression of the construct followed by the coding sequence of an 19 amino acid immunoglobulin leader peptide followed in frame by a FLAG tag, followed in frame by a sequence containing several restriction sites for cloning purposes and coding for a 9 amino acid artificial linker (SRTRSGSQL), followed in frame by the coding sequence of the C-terminal, transmembrane and truncated extracellular domain of human MCSP and a stop codon. Restriction sites were introduced at the beginning and at the end of the DNA fragment. The restriction sites EcoRI at the 5′ end and SalI at the 3′ end were used in the following cloning procedures. The fragment was digested with EcoRI and SalI and cloned into pEF-DHFR (pEF-DHFR is described in Mack et al. Proc. Natl. Acad. Sci. USA 92 (1995) 7021-7025) following standard protocols. A sequence verified plasmid was used to transfect CHO/dhfr− cells (ATCC No. CRL 9096). Cells were cultivated in RPMI 1640 with stabilized glutamine, supplemented with 10% FCS, 1% penicillin/streptomycin (all obtained from Biochrom AG Berlin, Germany) and nucleosides from a stock solution of cell culture grade reagents (Sigma-Aldrich Chemie GmbH, Taufkirchen, Germany) to a final concentration of 10 μg/ml Adenosine, 10 μg/ml Deoxyadenosine and 10 μg/ml Thymidine, in an incubator at 37° C., 95% humidity and 7% CO₂. Transfection was performed using the PolyFect Transfection Reagent (Qiagen GmbH, Hilden, Germany) and 5 μg of plasmid DNA according to the manufacturer's protocol. After cultivation for 24 hours cells were washed once with PBS and cultivated again in RPMI 1640 with stabilized glutamine and 1% penicillin/streptomycin. Thus the cell culture medium did not contain nucleosides and thereby selection was applied on the transfected cells. Approximately 14 days after transfection the outgrowth of resistant cells was observed. After an additional 7 to 14 days the transfectants were tested for expression of the construct by FACS analysis. 2.5×10⁵ cells were incubated with 50 μl of an anti-Flag-M2 antibody (Sigma-Aldrich Chemie GmbH, Taufkirchen, Germany) diluted to 5 μg/ml in PBS with 2% FCS. The binding of the antibody was detected with a R-Phycoerythrin-conjugated affinity purified F(ab′)2 fragment, goat anti-mouse IgG, Fc-gamma fragment specific diluted 1:100 in PBS with 2% FCS (ImmunoResearch Europe Ltd., Newmarket, Suffolk, UK). The samples were measured on a FACScalibur (BD biosciences, Heidelberg, Germany).

### 15. Cloning and Expression of the C-Terminal, Transmembrane and Truncated Extracellular Domains of Macaque MCSP

[0364] The cDNA sequence of the C-terminal, transmembrane and truncated extracellular domains of macaque MCSP (designated as macaque D3) was obtained by a set of three PCRs on macaque skin cDNA (Cat No. C1534218-Cy-BC; BioCat GmbH, Heidelberg, Germany) using the following reaction conditions: 1 cycle at 94° C., 3 min., 40 cycles with 94° C. for 0.5 min., 52° C. for 0.5 min. and 72° C. for 1.75 min., terminal cycle of 72° C. for 3 min. The following primers were used:

forward primer:
5′-GATCTGGTCTACACCATCGAGC-3′
reverse primer:
5′-GGAGCTGCTGCTGGCTCAGTGAGG-3′
forward primer:
5′-TTCCAGCTGAGCATGTCTGATGG-3′
reverse primer:
5′-CGATCAGCATCTGGGCCCAGG-3′
forward primer:
5′-GTGGAGCAGTTCACTCAGCAGGACC-3′
reverse primer:
5′-GCCTTCACACCCAGTACTGGCC-3′

[0365] Those PCRs generated three overlapping fragments (A: 1-1329, B: 1229-2428, C: 1782-2547) which were isolated and sequenced according to standard protocols using the PCR primers and thereby provided a 2547 bp portion of the cDNA sequence of macaque MCSP (the cDNA sequence and amino acid sequence of this portion of macaque MCSP are listed under SEQ ID NOs 376 and 375) from 74 bp upstream of the coding sequence of the C-terminal domain to 121 bp downstream of the stop codon. Another PCR using the following reaction conditions: 1 cycle at 94° C. for 3 min, 10 cycles with 94° C. for 1 min, 52° C. for 1 min and 72° C. for 2.5 min, terminal cycle of 72° C. for 3 min was used to fuse the PCR products of the aforementioned reactions A and B. The following primers are used:

forward primer:
5′-tcccgtacgagatctggatcccaattggatggcggactc
gtgctgttctcacacagagg-3′
reverse primer:
5′-agtgggtcgactcacacccagtactggccattcttaagg
gcaggg-3′

[0366] The primers for this PCR were designed to introduce restriction sites at the beginning and at the end of the cDNA fragment coding for the C-terminal, transmembrane and truncated extracellular domains of macaque MCSP. The introduced restriction sites MfeI at the 5′ end and SalI at the 3′ end, were used in the following cloning procedures. The PCR fragment was then cloned via MfeI and SalI into a Bluescript plasmid containing the EcoRI/MfeI fragment of the aforementioned plasmid pEF-DHFR (pEF-DHFR is described in Raum et al. Cancer Immunol Immunother 50 (2001) 141-150) by replacing the C-terminal, transmembrane and truncated extracellular domains of human MCSP. The gene synthesis fragment contained the coding sequences of the immunoglobulin leader peptide and the Flag tag as well as the artificial linker (SRTRSGSQL) in frame to the 5′ end of the cDNA fragment coding for the C-terminal, transmembrane and truncated extracellular domains of macaque MCSP. This vector was used to transfect CHO/dhfr− cells (ATCC No. CRL 9096). Cells were cultivated in RPMI 1640 with stabilized glutamine supplemented with 10% FCS, 1% penicillin/streptomycin (all from Biochrom AG Berlin, Germany) and nucleosides from a stock solution of cell culture grade reagents (Sigma-Aldrich Chemie GmbH, Taufkirchen, Germany) to a final concentration of 10 μg/ml Adenosine, 10 μg/ml Deoxyadenosine and 10 μg/ml Thymidine, in an incubator at 37° C., 95% humidity and 7% CO2. Transfection was performed with PolyFect Transfection Reagent (Qiagen GmbH, Hilden, Germany) and 5 μg of plasmid DNA according to the manufacturer's protocol. After cultivation for 24 hours cells were washed once with PBS and cultivated again in RPMI 1640 with stabilized glutamine and 1% penicillin/streptomycin. Thus the cell culture medium did not contain nucleosides and thereby selection was applied on the transfected cells. Approximately 14 days after transfection the outgrowth of resistant cells is observed. After an additional 7 to 14 days the transfectants were tested for expression of the recombinant construct via FACS. 2.5×10⁵ cells were incubated with 50 μl of an anti-Flag-M2 antibody (Sigma-Aldrich Chemie GmbH, Taufkirchen, Germany) diluted to 5 μg/ml in PBS with 2% FCS. Bound antibody was detected with a R-Phycoerythrin-conjugated affinity purified F(ab′)2 fragment, goat anti-mouse IgG, Fc-gamma fragment specific, diluted 1:100 in PBS with 2% FCS (Jackson ImmunoResearch Europe Ltd., Newmarket, Suffolk, UK). Samples were measured on a FACScalibur (BD biosciences, Heidelberg, Germany).

### 16. Generation and Characterisation of MCSP and CD3 Cross-Species Specific Bispecific Single Chain Molecules

[0367] Bispecific single chain antibody molecules each comprising a binding domain cross-species specific for human and non-chimpanzee primate CD3 epsilon as well as a binding domain cross-species-specific for human and non-chimpanzee primate MCSP, are designed as set out in the following Table 2:

TABLE 2
Formats of MCSP and CD3 cross-species specific bispecific single chain
antibodies

| SEQ ID | Formats of protein constructs |
|---|---|
| (nucl/prot) | (N → C) |
| 310/309 | MCSP-G4 HL × H2C HL |
| 312/311 | MCSP-G4 HL × F12Q HL |
| 314/313 | MCSP-G4 HL × I2C HL |
| 316/315 | MCSP-G4 HLP × F6A HLP |
| 318/317 | MCSP-G4 HLP × H2C HLP |
| 322/321 | MCSP-G4 HLP × G4H HLP |
| 326/325 | MCSP-G4 HLP × E1L HLP |
| 328/327 | MCSP-G4 HLP × E2M HLP |
| 332/331 | MCSP-G4 HLP × F12Q HL |
| 334/333 | MCSP-G4 HLP × I2C HL |
| 336/335 | MCSP-D2 HL × H2C HL |
| 338/337 | MCSP-D2 HL × F12Q HL |
| 340/339 | MCSP-D2 HL × I2C HL |
| 342/341 | MCSP-D2 HLP × H2C HLP |
| 344/343 | MCSP-F9 HL × H2C HL |
| 346/345 | MCSP-F9 HLP × H2C HLP |
| 348/347 | MCSP-F9 HLP × G4H HLP |

[0368] The aforementioned constructs containing the variable heavy-chain (VH) and variable light-chain (VL) domains cross-species specific for human and macaque MCSP D3 and the VH and VL domains cross-species specific for human and macaque CD3 were obtained by gene synthesis. The gene synthesis fragments were designed as to contain first a Kozak site for eukaryotic expression of the construct, followed by a 19 amino acid immunoglobulin leader peptide, followed in frame by the coding sequence of the respective bispecific single chain antibody molecule, followed in frame by the coding sequence of a histidine₆-tag and a stop codon. The gene synthesis fragment was also designed as to introduce suitable N- and C-terminal restriction sites. The gene synthesis fragment was cloned via these restriction sites into a plasmid designated pEF-DHFR (pEF-DHFR is described in Raum et al. Cancer Immunol Immunother 50 (2001) 141-150) according to standard protocols (Sambrook, Molecular Cloning; A Laboratory Manual, 3rd edition, Cold Spring Harbour Laboratory Press, Cold Spring Harbour, N.Y. (2001)). The constructs were transfected stably or transiently into DHFR-deficient CHO-cells (ATCC No. CRL 9096) by electroporation or alternatively into HEK 293 (human embryonal kidney cells, ATCC Number: CRL-1573) in a transient manner according to standard protocols.

[0369] Eukaryotic protein expression in DHFR deficient CHO cells was performed as described by Kaufmann R. J. (1990) Methods Enzymol. 185, 537-566. Gene amplification of the constructs was induced by addition of increasing concentrations of methothrexate (MTX) up to final concentrations of 20 nM MTX. After two passages of stationary culture the cells were grown in roller bottles with nucleoside-free HyQ PF CHO liquid soy medium (with 4.0 mM L-Glutamine with 0.1% Pluronic F-68; HyClone) for 7 days before harvest. The cells were removed by centrifugation and the supernatant containing the expressed protein is stored at −20° C.

[0370] Äkta® Explorer System (GE Health Systems) and Unicorn® Software were used for chromatography. Immobilized metal affinity chromatography (“IMAC”) was performed using a Fractogel EMD Chelate® (Merck) which was loaded with ZnCl₂ according to the protocol provided by the manufacturer. The column was equilibrated with buffer A (20 mM sodium phosphate buffer pH 7.2, 0.1 M NaCl) and the cell culture supernatant (500 ml) was applied to the column (10 ml) at a flow rate of 3 ml/min. The column was washed with buffer A to remove unbound sample. Bound protein was eluted using a two step gradient of buffer B (20 mM sodium phosphate buffer pH 7.2, 0.1 M NaCl, 0.5 M Imidazole) according to the following:

[0371] Step 1: 20% buffer B in 6 column volumes

[0372] Step 2: 100% buffer B in 6 column volumes

[0373] Eluted protein fractions from step 2 were pooled for further purification. All chemicals are of research grade and purchased from Sigma (Deisenhofen) or Merck (Darmstadt).

[0374] Gel filtration chromatography was performed on a HiLoad 16/60 Superdex 200 prep grade column (GE/Amersham) equilibrated with Equi-buffer (25 mM Citrate, 200 mM Lysine, 5% Glycerol, pH 7.2). Eluted protein samples (flow rate 1 ml/min) were subjected to standard SDS-PAGE and Western Blot for detection. Prior to purification, the column was calibrated for molecular weight determination (molecular weight marker kit, Sigma MW GF-200). Protein concentrations were determined using OD280 nm.

[0375] Purified bispecific single chain antibody protein was analyzed in SDS PAGE under reducing conditions performed with pre-cast 4-12% Bis Tris gels (Invitrogen). Sample preparation and application were performed according to the protocol provided by the manufacturer. The molecular weight was determined with MultiMark protein standard (Invitrogen). The gel was stained with colloidal Coomassie (Invitrogen protocol). The purity of the isolated protein is >95% as determined by SDS-PAGE.

[0376] The bispecific single chain antibody has a molecular weight of about 52 kDa under native conditions as determined by gel filtration in phosphate buffered saline (PBS). All constructs were purified according to this method.

[0377] Western Blot was performed using an Optitran® BA-S83 membrane and the Invitrogen Blot Module according to the protocol provided by the manufacturer. For detection of the bispecific single chain antibody protein antibodies an anti-His Tag antibody was used (Penta His, Qiagen). A Goat-anti-mouse Ig antibody labeled with alkaline phosphatase (AP) (Sigma) was used as secondary antibody and BCIP/NBT (Sigma) as substrate. A single band was detected at 52 kD corresponding to the purified bispecific single chain antibody.

[0378] Alternatively, constructs were transiently expressed in DHFR deficient CHO cells. In brief, 4×105 cells per construct were cultivated in 3 ml RPMI 1640 all medium with stabilized glutamine supplemented with 10% fetal calf serum, 1% penicillin/streptomycin and nucleosides from a stock solution of cell culture grade reagents (Sigma-Aldrich Chemie GmbH, Taufkirchen, Germany) to a final concentration of 10 μg/ml Adenosine, 10 μg/ml Deoxyadenosine and 10 μg/ml Thymidine, in an incubator at 37° C., 95% humidity and 7% CO2 one day before transfection. Transfection was performed with Fugene 6 Transfection Reagent (Roche, #11815091001) according to the manufacturer's protocol. 94 μl OptiMEM medium (Invitrogen) and 6 μl Fugene 6 are mixed and incubated for 5 minutes at room temperature. Subsequently, 1.5 μg DNA per construct were added, mixed and incubated for 15 minutes at room temperature. Meanwhile, the DHFR deficient CHO cells were washed with 1×PBS and resuspended in 1.5 ml RPMI 1640 all medium. The transfection mix was diluted with 600 μl RPMI 1640 all medium, added to the cells and incubated overnight at 37° C., 95% humidity and 7% CO2. The day after transfection the incubation volume of each approach was extended to 5 ml RPMI 1640 all medium. Supernatant was harvested after 3 days of incubation.

### 17. Flow Cytometric Binding Analysis of the MCSP and CD3 Cross-Species Specific Bispecific Antibodies

[0379] In order to test the functionality of the cross-species specific bispecific antibody constructs regarding the capability to bind to human and macaque MCSP D3 and CD3, respectively, a FACS analysis was performed. For this purpose CHO cells transfected with human MCSP D3 (as described in Example 14) and the human CD3 positive T cell leukemia cell line HPB-ALL (DSMZ, Braunschweig, ACC483) were used to test the binding to human antigens. The binding reactivity to macaque antigens was tested by using the generated macaque MCSP D3 transfectant (described in Example 15) and a macaque T cell line 4119LnPx (kindly provided by Prof. Fickenscher, Hygiene Institute, Virology, Erlangen-Nuernberg; published in Knappe A, et al., and Fickenscher H., Blood 2000, 95, 3256-61). 200.000 cells of the respective cell lines were incubated for 30 min on ice with 50 μl of the purified protein of the cross-species specific bispecific antibody constructs (2 μg/ml) or cell culture supernatant of transfected cells expressing the cross-species specific bispecific antibody constructs. The cells were washed twice in PBS with 2% FCS and binding of the construct was detected with a murine anti-His antibody (Penta His antibody; Qiagen; diluted 1:20 in 50 μl PBS with 2% FCS). After washing, bound anti-His antibodies were detected with an Fc gamma-specific antibody (Dianova) conjugated to phycoerythrin, diluted 1:100 in PBS with 2% FCS. Supernatant of untransfected CHO cells was used as negative control for binding to the T cell lines. A single chain construct with irrelevant target specificity was used as negative control for binding to the MCSP-D3 transfected CHO cells.

[0380] Flow cytometry was performed on a FACS-Calibur apparatus; the CellQuest software was used to acquire and analyze the data (Becton Dickinson biosciences, Heidelberg). FACS staining and measuring of the fluorescence intensity were performed as described in Current Protocols in Immunology (Coligan, Kruisbeek, Margulies, Shevach and Strober, Wiley-Interscience, 2002).

[0381] The bispecific binding of the single chain molecules listed above, which are cross-species specific for MCSP D3 and cross-species specific for human and macaque CD3 was clearly detectable as shown in FIGS. 14, 15, 16 and 58. In the FACS analysis all constructs showed binding to CD3 and MCSP D3 as compared to the respective negative controls. Cross-species specificity of the bispecific antibodies to human and macaque CD3 and MCSP D3 antigens was demonstrated.

### 18. Bioactivity of MCSP and CD3 Cross-Species Specific Bispecific Single Chain Antibodies

[0382] As shown in FIGS. 17A-17B to 21A-21B, all of the generated cross-species specific bispecific single chain antibody constructs revealed cytotoxic activity against human MSCP positive target cells elicited by human CD8+ cells and cynomolgus MSCP positive target cells elicited by the macaque T cell line 4119LnPx. A bispecific single chain antibody with different target specificity is used as negative control.

### 19. Plasma Stability of MCSP and CD3 Cross-Species Specific Bispecific Single Chain Antibodies

[0383] Stability of the generated bispecific single chain antibodies in human plasma was analyzed by incubation of the bispecific single chain antibodies in 50% human Plasma at 37° C. and 4° C. for 24 hours and subsequent testing of bioactivity. Bioactivity was studied in a chromium 51 (⁵¹Cr) release in vitro cytotoxicity assay using a MCSP positive CHO cell line (expressing MCSP as cloned according to example 14 or 15) as target and stimulated human CD8 positive T cells as effector cells.

[0384] EC₅₀ values calculated by the analysis program as described above are used for comparison of bioactivity of bispecific single chain antibodies incubated with 50% human plasma for 24 hours at 37° C. and 4° C. respectively with bispecific single chain antibodies without addition of plasma or mixed with the same amount of plasma immediately prior to the assay.

[0385] As shown in FIGS. 22A-22C and Table 3 the bioactivity of the G4 H-L×I2C H-L, G4 H-L×H2C H-L and G4 H-L×F120 H-L bispecific antibodies was not significantly reduced as compared with the controls without the addition of plasma or with addition of plasma immediately before testing of bioactivity.

TABLE 3
bioactivity of the bispecific antibodies
without or with the addition of Plasma

| | Without | | | |
|---|---|---|---|---|
| Construct | plasma | With plasma | Plasma 37° C. | Plasma 4° C. |
| G4 H-L × | 300 | 796 | 902 | 867 |
| I2C H-L | | | | |
| G4 H-L × | 496 | 575 | 2363 | 1449 |
| H2C H-L | | | | |
| G4 H-L × | 493 | 358 | 1521 | 1040 |
| F12Q H-L | | | | |

### 20. Generation of Human EGFR and CD3 Cross-Species Specific Bispecific Single Chain Molecules

[0386] Bispecific single chain antibody molecules with a binding domain cross-species specific for human and cynomolgus CD3 as well as a binding domain cross-species-specific for human EGFR, are designed as set out in the following Table 4:

TABLE 4
Formats of EGFR and CD3 cross-species specific bispecific single chain
antibodies

| SEQ ID | Formats of protein constructs |
|---|---|
| (nucl/prot) | (N → C) |
| 390/389 | EGFR H-L × I2C H L |
| 392/391 | EGFR L-H × I2C H L |
| 394/393 | EGFR H-L × F12Q H L |
| 396/395 | EGFR L-H × F12Q H L |
| 398/397 | EGFR H-L × H2C H L |
| 400/399 | EGFR L-H × H2C H L |
| 448/447 | EGFR HL × H2C HL |
| 450/449 | EGFR HL × F12Q LH |
| 452/451 | EGFR HL × I2C HL |

[0387] The aforementioned constructs containing the variable light-chain (L) and variable heavy-chain (H) domains cross-species specific for human and cynomolgus EGFR were obtained by gene synthesis. The gene synthesis fragments were designed as to contain first a Kozak site for eukaryotic expression of the construct, followed by a 19 amino acid immunoglobulin leader peptide, followed in frame by the coding sequence of the respective bispecific single chain antibody molecule, followed in frame by the coding sequence of a 6 histidine tag and a stop codon.

[0388] The gene synthesis fragment was also designed as to introduce suitable N- and C-terminal restriction sites. The gene synthesis fragment was cloned via these restriction sites into a plasmid designated pEF-DHFR (pEF-DHFR is described in Raum et al. Cancer Immunol Immunother 50 (2001) 141-150) according to standard protocols (Sambrook, Molecular Cloning; A Laboratory Manual, 3rd edition, Cold Spring Harbour Laboratory Press, Cold Spring Harbour, N.Y. (2001)). The constructs were stably transfected into DHFR-deficient CHO-cells (ATCC No. CRL 9096) as well as produced and purified as described in example 10.

### 21. Generation of Human EGFR and CD3 Cross-Species Specific Bispecific Single Chain Molecules

[0389] Bispecific single chain antibody molecules with a binding domain cross-species specific for human and cynomolgus CD3 as well as a binding domain cross-species-specific for human EGFR, are designed as set out in the following Table 5:

TABLE 5
Formats of EGFR and CD3 cross-species specific bispecific single chain
antibodies

| SEQ ID | Formats of protein constructs |
|---|---|
| (nucl/prot) | (N → C) |
| 410/4099 | EGFR H-L × I2C H L |
| 412/411 | EGFR L-H × I2C H L |
| 414/413 | EGFR H-L × F12Q H L |
| 416/415 | EGFR L-H × F12Q H L |
| 418/417 | EGFR H-L × H2C H L |
| 420/419 | EGFR L-H × H2C H L |

[0390] The aforementioned constructs containing the variable light-chain (L) and variable heavy-chain (H) domains cross-species specific for human and cynomolgus EGFR were obtained by gene synthesis. The gene synthesis fragments were designed as to contain first a Kozak site for eukaryotic expression of the construct, followed by a 19 amino acid immunoglobulin leader peptide, followed in frame by the coding sequence of the respective bispecific single chain antibody molecule, followed in frame by the coding sequence of a 6 histidine tag and a stop codon.

[0391] The gene synthesis fragment was also designed as to introduce suitable N- and C-terminal restriction sites. The gene synthesis fragment was cloned via these restriction sites into a plasmid designated pEF-DHFR (pEF-DHFR is described in Raum et al. Cancer Immunol Immunother 50 (2001) 141-150) according to standard protocols (Sambrook, Molecular Cloning; A Laboratory Manual, 3rd edition, Cold Spring Harbour Laboratory Press, Cold Spring Harbour, N.Y. (2001)). The constructs were stably transfected into DHFR-deficient CHO-cells (ATCC No. CRL 9096) as well as produced and purified as described in example 10.

### 22. Generation of Human Her2/Neu and CD3 Cross-Species Specific Bispecific Single Chain Molecules

[0392] Bispecific single chain antibody molecules with a binding domain cross-species specific for human and cynomolgus CD3 as well as a binding domain cross-species-specific for human Her2/neu, are designed as set out in the following Table 6:

TABLE 6
Formats of Her2/neu and CD3 cross-species
specific bispecific single chain antibodies

| SEQ ID | Formats of protein constructs |
|---|---|
| (nucl/prot) | (N → C) |
| 430/439 | HER2/neu VH-VL × I2C VH VL |
| 432/431 | HER2/neu VL-VH × I2C VH VL |
| 434/433 | HER2/neu VH-VL × F12Q VH VL |
| 436/435 | HER2/neu VL-VH × F12Q VH VL |
| 438/437 | HER2/neu VH-VL × H2C VH VL |
| 440/439 | HER2/neu VL-VH × H2C VH VL |

[0393] The aforementioned constructs containing the variable light-chain (L) and variable heavy-chain (H) domains cross-species specific for human and cynomolgus HER2/neu were obtained by gene synthesis. The gene synthesis fragments were designed as to contain first a Kozak site for eukaryotic expression of the construct, followed by a 19 amino acid immunoglobulin leader peptide, followed in frame by the coding sequence of the respective bispecific single chain antibody molecule, followed in frame by the coding sequence of a 6 histidine tag and a stop codon.

[0394] The gene synthesis fragment was also designed as to introduce suitable N- and C-terminal restriction sites. The gene synthesis fragment was cloned via these restriction sites into a plasmid designated pEF-DHFR (pEF-DHFR is described in Raum et al. Cancer Immunol Immunother 50 (2001) 141-150) according to standard protocols (Sambrook, Molecular Cloning; A Laboratory Manual, 3rd edition, Cold Spring Harbour Laboratory Press, Cold Spring Harbour, N.Y. (2001)). The constructs were stably transfected into DHFR-deficient CHO-cells (ATCC No. CRL 9096) as well as produced and purified as described in example 10.

### 23.1. Generation of CHO Cells Expressing Human HER2

[0395] The coding sequence of human HER2 as published in GenBank (Accession number X03363) is obtained by gene synthesis according to standard protocols. The gene synthesis fragment is designed as to contain the coding sequence of the human HER2 protein including its leader peptide (the cDNA and amino acid sequence of the construct is listed under SEQ ID Nos 459 and 460). The gene synthesis fragment is also designed as to introduce restriction sites at the beginning and at the end of the fragment. The introduced restriction sites, XbaI at the 5′ end and SalI at the 3′ end, are utilised in the following cloning procedures. The gene synthesis fragment is cloned via XbaI and SalI into a plasmid designated pEFDHFR (pEFDHFR is described in Raum et al. Cancer Immunol Immunother 50 (2001) 141-150) following standard protocols. The aforementioned procedures are carried out according to standard protocols (Sambrook, Molecular Cloning; A Laboratory Manual, 3rd edition, Cold Spring Harbour Laboratory Press, Cold Spring Harbour, N.Y. (2001)). A clone with sequence-verified nucleotide sequence is transfected into DHFR deficient CHO cells for eukaryotic expression of the construct. Eukaryotic protein expression in DHFR deficient CHO cells is performed as described by Kaufmann R. J. (1990) Methods Enzymol. 185, 537-566. Gene amplification of the construct is induced by increasing concentrations of methotrexate (MTX) to a final concentration of up to 20 nM MTX.

### 23.2. Generation of CHO Cells Expressing the Extracellular Domain of Macaque Her2

[0396] The coding sequence of human Her2 as described above is modified to encode the amino acids 123 to 1038 of the macaque Her2 protein as published in GenBank (Accession number XP_001090430). The coding sequence for this chimeric protein is obtained by gene synthesis according to standard protocols (the cDNA and amino acid sequence of the construct is listed under SEQ ID Nos 461 and 462). The gene synthesis fragment is also designed as to contain a Kozak site for eukaryotic expression of the construct and restriction sites at the beginning and the end of the fragment. The introduced restriction sites XbaI at the 5′ end and SalI at the 3′ end, are utilized in the following cloning procedures. The gene synthesis fragment is then cloned via XbaI and SalI into a plasmid designated pEFDHFR (pEFDHFR is described in Raum et al. Cancer Immunol Immunother 50 (2001) 141-150). A sequence verified clone of this plasmid is used to transfect CHO/dhfr− cells as described above.

### 23.3. Generation of HER2 and CD3 Cross-Species Specific Bispecific Single Chain Molecules

### 3.1. Cloning of Cross-Species Specific Binding Molecules

[0397] Generally, bispecific single chain antibody molecules, each comprising a domain with a binding specificity cross-species specific for human and macaque CD3epsilon as well as a domain with a binding specificity cross-species specific for human and macaque HER2, are designed as set out in the following Table 7:

TABLE 7
Formats of anti-CD3 and anti-HER2 cross-species
specific bispecific single chain antibody molecules

| SEQ ID | Formats of protein constructs |
|---|---|
| (nucl/prot) | (N → C) |
| 432/431 | Her2 LH × I2C HL |
| 436/435 | Her2 LH × F12Q HL |
| 440/439 | Her2 LH × H2C HL |
| 430/429 | Her2 HL × I2C HL |
| 434/433 | Her2 HL × F12Q HL |
| 438/437 | Her2 HL × H2C HL |
| 480/479 | I2C HL × Her2 LH |
| 478/477 | F12Q HL × Her2 LH |
| 476/475 | H2C HL × Her2 LH |

[0398] The aforementioned constructs containing the variable light-chain (L) and variable heavy-chain (H) domains cross-species specific for human and macaque HER2 and the CD3 specific VH and VL combinations cross-species specific for human and macaque CD3 are obtained by gene synthesis. The gene synthesis fragments are designed as to contain first a Kozak site for eukaryotic expression of the construct, followed by a 19 amino acid immunoglobulin leader peptide, followed in frame by the coding sequence of the respective bispecific single chain antibody molecule, followed in frame by the coding sequence of a 6 histidine tag and a stop codon. The gene synthesis fragment is also designed as to introduce suitable restriction sites at the beginning and at the end of the fragment. The introduced restriction sites are utilised in the following cloning procedures. The gene synthesis fragment is cloned via these restriction sites into a plasmid designated pEFDHFR (pEFDHFR is described in Raum et al. Cancer Immunol Immunother 50 (2001) 141-150) following standard protocols. The aforementioned procedures are carried out according to standard protocols (Sambrook, Molecular Cloning; A Laboratory Manual, 3rd edition, Cold Spring Harbour Laboratory Press, Cold Spring Harbour, N.Y. (2001)). A clone with sequence-verified nucleotide sequence is transfected into DHFR deficient CHO cells for eukaryotic expression of the construct. Eukaryotic protein expression in DHFR deficient CHO cells is performed as described by Kaufmann R. J. (1990) Methods Enzymol. 185, 537-566. Gene amplification of the construct is induced by increasing concentrations of methothrexate (MTX) to a final concentration of up to 20 nM MTX.

### 3.2. Expression and Purification of the Bispecific Single Chain Antibody Molecules

[0399] The bispecific single chain antibody molecules are expressed in Chinese hamster ovary cells (CHO). Eukaryotic protein expression in DHFR deficient CHO cells is performed as described by Kaufmann R. J. (1990) Methods Enzymol. 185, 537-566. Gene amplification of the constructs is induced by addition of increasing concentrations of MTX up to final concentrations of 20 nM MTX. After two passages of stationary culture the cells are grown in roller bottles with nucleoside-free HyQ PF CHO liquid soy medium (with 4.0 mM L-Glutamine with 0.1% Pluronic F-68; HyClone) for 7 days before harvest. The cells are removed by centrifugation and the supernatant containing the expressed protein is stored at −80° C. Transfection is performed with 293fectin reagent (Invitrogen, #12347-019) according to the manufacturer's protocol.

[0400] Äkta® Explorer System (GE Health Systems) and Unicorn® Software are used for chromatography. Immobilized metal affinity chromatography (“IMAC”) is performed using a Fractogel EMD Chelate® (Merck) which is loaded with ZnCl₂ according to the protocol provided by the manufacturer. The column is equilibrated with buffer A (20 mM sodium phosphate buffer pH 7.2, 0.1 M NaCl) and the cell culture supernatant (500 ml) is applied to the column (10 ml) at a flow rate of 3 ml/min. The column is washed with buffer A to remove unbound sample. Bound protein is eluted using a two step gradient of buffer B (20 mM sodium phosphate buffer pH 7.2, 0.1 M NaCl, 0.5 M Imidazole) according to the following:

[0401] Step 1: 20% buffer B in 6 column volumes

[0402] Step 2: 100% buffer B in 6 column volumes

[0403] Eluted protein fractions from step 2 are pooled for further purification. All chemicals are of research grade and purchased from Sigma (Deisenhofen) or Merck (Darmstadt).

[0404] Gel filtration chromatography is performed on a HiLoad 16/60 Superdex 200 prep grade column (GE/Amersham) equilibrated with Equi-buffer (25 mM Citrate, 200 mM Lysine, 5% Glycerol, pH 7.2). Eluted protein samples (flow rate 1 ml/min) are subjected to standard SDS-PAGE and Western Blot for detection. Prior to purification, the column is calibrated for molecular weight determination (molecular weight marker kit, Sigma MW GF-200). Protein concentrations are determined using OD280 nm.

[0405] Purified bispecific single chain antibody protein is analyzed in SDS PAGE under reducing conditions performed with pre-cast 4-12% Bis Tris gels (Invitrogen). Sample preparation and application are performed according to the protocol provided by the manufacturer. The molecular weight is determined with MultiMark protein standard (Invitrogen). The gel is stained with colloidal Coomassie (Invitrogen protocol). The purity of the isolated protein is >95% as determined by SDS-PAGE.

[0406] The bispecific single chain antibody has a molecular weight of about 52 kDa under native conditions as determined by gel filtration in PBS. All constructs are purified according to this method.

[0407] Western Blot is performed using an Optitran® BA-S83 membrane and the Invitrogen Blot Module according to the protocol provided by the manufacturer. For detection of the bispecific single chain antibody protein antibodies an anti-His Tag antibody is used (Penta His, Qiagen). A Goat-anti-mouse Ig antibody labeled with alkaline phosphatase (AP) (Sigma) is used as secondary antibody and BCIP/NBT (Sigma) as substrate. A single band is detected at 52 kD corresponding to the purified bispecific single chain antibody.

### 23.4. Flow Cytometric Binding Analysis of the HER2 and CD3 Cross-Species Specific Bispecific Antibodies

[0408] In order to test the functionality of the cross-species specific bispecific antibody constructs regarding the capability to bind to human and macaque HER2 and CD3, respectively, a FACS analysis is performed. For this purpose CHO cells transfected with human HER2 as described in Example 23.1 and the human CD3 positive T cell leukemia cell line HPB-ALL (DSMZ, Braunschweig, ACC483) are used to test the binding to human antigens. The binding reactivity to macaque antigens is tested by using the generated macaque HER2 transfectant described in Example 23.2 and a macaque T cell line 4119LnPx (kindly provided by Prof. Fickenscher, Hygiene Institute, Virology, Erlangen-Nuernberg; published in Knappe A, et al., and Fickenscher H., Blood 2000, 95, 3256-61). 200.000 cells of the respective cell lines are incubated for 30 min on ice with 50 μl of the purified protein of the cross-species specific bispecific antibody constructs (2 μg/ml). The cells are washed twice in PBS with 2% FCS and binding of the construct is detected with a murine anti-His antibody (Penta His antibody; Qiagen; diluted 1:20 in 50 μl PBS with 2% FCS). After washing, bound anti-His antibodies are detected with an Fc gamma-specific antibody (Dianova) conjugated to phycoerythrin, diluted 1:100 in PBS with 2% FCS. PBS with 2% FCS is used as negative control for binding to the T cell lines as well as to the HER2 transfected CHO cells.

[0409] Flow cytometry is performed on a FACS-Calibur apparatus; the CellQuest software is used to acquire and analyze the data (Becton Dickinson biosciences, Heidelberg). FACS staining and measuring of the fluorescence intensity are performed as described in Current Protocols in Immunology (Coligan, Kruisbeek, Margulies, Shevach and Strober, Wiley-Interscience, 2002).

[0410] The bispecific binding of the single chain molecules listed above, which are cross-species specific for HER2 and cross-species specific for human and non-chimpanzee primate CD3 is clearly detectable as shown in FIG. 23A-23B. In the FACS analysis all constructs show binding to CD3 and HER2 as compared to the respective negative controls. Cross-species specificity of the bispecific antibodies to human and macaque CD3 and HER2 antigens is demonstrated.

### 23.5. Bioactivity of HER2 and CD3 Cross-Species Specific Bispecific Single Chain Antibodies

[0411] Bioactivity of the generated bispecific single chain antibodies is analyzed by chromium 51 (⁵¹Cr) release in vitro cytotoxicity assays using the HER2 positive cell lines described in Examples 23.1 and 23.2. As effector cells stimulated human CD4/CD56 depleted PBMC or the macaque T cell line 4119LnPx are used as specified in the respective figures.

[0412] Generation of the stimulated CD4/CD56 depleted PBMC is performed as follows:

[0413] A Petri dish (85 mm diameter, Nunc) is coated with a commercially available anti-CD3 specific antibody (e.g. OKT3, Othoclone) in a final concentration of 1 μg/ml for 1 hour at 37° C. Unbound protein is removed by one washing step with PBS. The fresh PBMC are isolated from peripheral blood (30-50 ml human blood) by Ficoll gradient centrifugation according to standard protocols. 3-5×10⁷ PBMC are added to the precoated petri dish in 50 ml of RPMI 1640 with stabilized glutamine/10% FCS/IL-2 20 U/ml (Proleukin, Chiron) and stimulated for 2 days. On the third day the cells are collected and washed once with RPMI 1640. IL-2 is added to a final concentration of 20 U/ml and the cells are cultivated again for one day in the same cell culture medium as above. By depletion of CD4+ T cells and CD56+ NK cells according to standard protocols CD8+ cytotoxic T lymphocytes (CTLs) are enriched. Target cells are washed twice with PBS and labelled with 11.1 MBq ⁵¹Cr in a final volume of 100 μl RPMI with 50% FCS for 45 minutes at 37° C. Subsequently the labelled target cells are washed 3 times with 5 ml RPMI and then used in the cytotoxicity assay. The assay is performed in a 96 well plate in a total volume of 250 μl supplemented RPMI (as above) with E:T ratios of 1:1 or 10:1, which are specified in the respective figures. 1 μg/ml of the cross-species specific bispecific single chain antibody molecules and 15-21 fivefold dilutions thereof are applied. The assay time is 18 hours and cytotoxicity is measured as relative values of released chromium in the supernatant related to the difference of maximum lysis (addition of Triton-X) and spontaneous lysis (without effector cells). All measurements are done in quadruplicates. Measurement of chromium activity in the supernatants is performed with a Wizard 3″ gamma counter (Perkin Elmer Life Sciences GmbH, Köln, Germany). Analysis of the experimental data is performed with Prism 4 for Windows (version 4.02, GraphPad Software Inc., San Diego, Calif., USA). Sigmoidal dose response curves typically have R² values >0.90 as determined by the software. EC₅₀ values calculated by the analysis program are used for comparison of bioactivity.

[0414] As shown in FIG. 24 cross-species specific bispecific single chain antibody constructs demonstrate cytotoxic activity against human HER2 positive target cells elicited by stimulated human CD4/CD56 depleted PBMC and against macaque HER2 positive target cells elicited by the macaque T cell line 4119LnPx.

### Example 24

### Cloning and Expression of the Human and Macaque Membrane Bound Form of IgE

[0415] The mouse cell line J558L (obtained from Interlab Project, Istituto Nazionale per la Ricerca sul Cancro, Genova, Italy, ECACC 88032902), a spontaneous heavy chain-loss-variant myeloma cell line that synthesizes and secretes a lambda light chain, was used to be complemented by a membrane bound heavy chain variant of the human and macaque IgE, respectively. In order to generate such constructs synthetic molecules were obtained by gene synthesis according to standard protocols (the nucleotide sequences of the constructs are listed under SEQ ID Nos 507 and 508). In these constructs the coding sequence for human and macaque c epsilon chain was fused to the human transmembrane region of IgE, respectively. The built in specificity of the VH chain is directed against the hapten (4-hydroxy-3-nitro-phenyl)acetyl) (NP). The gene synthesis fragment was also designed as to contain a Kozak site for eukaryotic expression of the construct and an immunoglobulin leader and restriction sites at the beginning and the end of the DNA. The introduced restriction sites EcoRI at the 5′ end and SalI at the 3′ end were utilised during the cloning step into the expression plasmid designated pEFDHFR. After sequence verification (macaque: XM_001116734 macaca mulatta Ig epsilon C region, mRNA; human: NC_000014 Homo sapiens chromosome 14, complete sequence, National Center for Biotechnology Information, http://www.ncbi.nlm.nih.gov/entrez) the plasmids were used to transfect CHO/dhfr-cells as described above. Eukaryotic protein expression in DHFR deficient CHO cells is performed as described by Kaufmann R. J. (1990) Methods Enzymol. 185, 537-566. Gene amplification of the construct is induced by increasing concentrations of methothrexate (MTX) to a final concentration of up to 20 nM MTX.

### Example 25

### Generation of IgE and CD3 Cross-Species Specific Bispecific Single Chain Molecules

[0416] Generally, bispecific single chain antibody molecules, each comprising a domain with a binding specificity for the human and the cynomolgus CD3 antigen as well as a domain with a binding specificity for the human and the macaque IgE antigen, were designed as set out in the following Table 8:

TABLE 8
Formats of anti-CD3 and anti-IgE cross-species specific bispecific single
chain antibody molecules

| SEQ ID | Formats of protein constructs |
|---|---|
| (nucl/prot) | (N → C) |
| 496/495 | IgE HL × H2C HL |
| 498/497 | IgE HL × F12Q HL |
| 500/499 | IgE HL × I2C HL |
| 502/501 | IgE LH × H2C HL |
| 504/503 | IgE LH × F12Q HL |
| 506/505 | IgE LH × I2C HL |

[0417] The aforementioned constructs containing the variable light-chain (L) and variable heavy-chain (H) domains cross-species specific for human and macaque IgE and the CD3 specific VH and VL combinations cross-species specific for human and macaque CD3 are obtained by gene synthesis. The gene synthesis fragments are designed as to contain first a Kozak site for eukaryotic expression of the construct, followed by a 19 amino acid immunoglobulin leader peptide, followed in frame by the coding sequence of the respective bispecific single chain antibody molecule, followed in frame by the coding sequence of a 6 histidine tag and a stop codon. The gene synthesis fragment is also designed as to introduce suitable restriction sites at the beginning and at the end of the fragment. The introduced restriction sites are utilised in the following cloning procedures. The gene synthesis fragment is cloned via these restriction sites into a plasmid designated pEFDHFR following standard protocols. A clone with sequence-verified nucleotide sequence is transfected into DHFR deficient CHO cells for eukaryotic expression of the construct. Eukaryotic protein expression in DHFR deficient CHO cells is performed as described by Kaufmann R. J. (1990) Methods Enzymol. 185, 537-566. Gene amplification of the construct is induced by increasing concentrations of methothrexate (MTX) to a final concentration of up to 20 nM MTX. Alternatively the constructs are transfected into DHFR-deficient CHO-cells in a transient manner according to standard protocols.

[0418] The FACS binding experiments were performed with the human IgE transfected J558L cell line to assess the binding capability to the human IgE. The cross-species specificity to macaque IgE positive cells was tested by deploying the J558L cells transfected with the macaque IgE. The same changes in cell lines apply to the cytotoxicity assays performed with the IgE and CD3 cross-species specific bispecific single chain antibodies. Apart from this the assays were performed as described in examples 4 and 5.

[0419] As depicted in FIGS. 23A-23B, the generated IgE and CD3 cross-species specific bispecific single chain antibodies demonstrated binding to both the human and cynomolgus antigens and proved to be fully cross-species specific.

[0420] As shown in FIGS. 24A-24D, all of the generated cross-species specific bispecific single chain antibody constructs revealed cytotoxic activity against human IgE positive target cells elicited by human CD8+ cells and macaque IgE positive target cells elicited by the macaque T cell line 4119LnPx. As a negative control, an irrelevant bispecific single chain antibody has been used.

### Example 26

### Specific Binding of scFv Clones to the N-Terminus of Human CD3 Epsilon

[0421] 26.1. Bacterial Expression of scFv Constructs in E. coli XL1 Blue

[0422] As previously mentioned, E. coli XL1 Blue transformed with pComb3H5Bhis/Flag containing a VL- and VH-segment produce soluble scFv in sufficient amounts after excision of the gene III fragment and induction with 1 mM IPTG. The scFv-chain is exported into the periplasma where it folds into a functional conformation.

[0423] The following scFv clones were chosen for this experiment:
[0424] i) ScFvs 4-10, 3-106, 3-114, 3-148, 4-48, 3-190 and 3-271 as described in WO 2004/106380.
[0425] ii) ScFvs from the human anti-CD3epsilon binding clones H2C, F12Q and I2C as described herein.

[0426] For periplasmic preparations, bacterial cells transformed with the respective scFv containing plasmids allowing for periplasmic expression were grown in SB-medium supplemented with 20 mM MgCl₂ and carbenicillin 50 μg/ml and redissolved in PBS after harvesting. By four rounds of freezing at −70° C. and thawing at 37° C., the outer membrane of the bacteria was destroyed by osmotic shock and the soluble periplasmic proteins including the scFvs were released into the supernatant. After elimination of intact cells and cell-debris by centrifugation, the supernatant containing the human anti-human CD3-scFvs was collected and used for further examination. These crude supernatants containing scFv will be further termed periplasmic preparations (PPP).

26.2. Binding of scFvs to Human CD3 Epsilon (aa 1-27)-Fc Fusion Protein

[0427] ELISA experiments were carried out by coating the human CD3 epsilon (aa 1-27)-Fc fusion protein to the wells of 96 well plastic plates (Nunc, maxisorb) typically at 4° C. over night. The antigen coating solution was then removed, wells washed once with PBS/0.05% Tween 20 and subsequently blocked with PBS/3% BSA for at least one hour. After removal of the blocking solution, PPPs and control solutions were added to the wells and incubated for typically one hour at room temperature. The wells were then washed three times with PBS/0.05% Tween 20. Detection of scFvs bound to immobilized antigen was carried out using a Biotin-labeled anti FLAG-tag antibody (M2 anti Flag-Bio, Sigma, typically at a final concentration of 1 μg/ml PBS) and detected with a peroxidase-labeled Streptavidine (Dianova, 1 μg/ml PBS). The signal was developed by adding ABTS substrate solution and measured at a wavelength of 405 nm. Unspecific binding of the test-samples to the blocking agent and/or the human IgG1 portion of the human CD3 epsilon (aa 1-27)-Fc fusion protein was examined by carrying out the identical assay with the identical reagents and identical timing on ELISA plates which were coated with human IgG1 (Sigma). PBS was used as a negative control.

[0428] As shown in FIG. 25, scFvs H2C, F12Q and I2C show strong binding signals on human CD3 epsilon (aa 1-27)-Fc fusion protein. The human scFvs 3-106, 3-114, 3-148, 3-190, 3-271, 4-10 and 4-48 (as described in WO 2004/106380) do not show any significant binding above negative control level.

[0429] To exclude the possibility that the positive binding of scFvs H2C, F12Q and I2C to wells coated with human CD3 epsilon (aa 1-27)-Fc fusion protein might be due to binding to BSA (used as a blocking agent) and/or the human IgG1 Fc-gamma-portion of the human CD3 epsilon (aa 1-27)-Fc fusion protein, a second ELISA experiment was performed in parallel. In this second ELISA experiment, all parameters were identical to those in the first ELISA experiment, except that in the second ELISA experiment human IgG1 (Sigma) was coated instead of human CD3 epsilon (aa 1-27)-Fc fusion protein. As shown in FIG. 26, none of the scFvs tested showed any significant binding to BSA and/or human IgG1 above background level.

[0430] Taken together, these results allow the conclusion that the scFvs 4-10, 3-271, 3-148, 3-190, 4-48, 3-106 and 3-114 do not bind specifically to the human CD3 epsilon (aa 1-27)-region, whereas the scFvs H2C, F12Q and I2C clearly show specific binding to the N-terminal 27 amino acids of human CD3 epsilon.

1. A polypeptide comprising a first binding domain which binds to an epitope of human and Callithrix jacchus, Saguinus oedipus or Saimiri sciureus CD3 epsilon (CD3ε) chain, wherein the epitope is part of an amino acid sequence comprising SEQ ID NO: 2, 4, 6, or 8 and comprising at least the amino acid sequence Gln-Asp-Gly-Asn-Glu (SEQ ID NO: 509), and a second binding domain which binds to EGFR, Her2/neu or IgE of a human and/or a non-chimpanzee primate.

2. (canceled)

3. The polypeptide of claim 1, wherein the first binding domain comprises
(i) a VL region comprising CDR-L1, CDR-L2 and CDR-L3 selected from:
(a) CDR-L1 as depicted in SEQ ID NO. 27, CDR-L2 as depicted in SEQ ID NO. 28 and CDR-L3 as depicted in SEQ ID NO. 29;
(b) CDR-L1 as depicted in SEQ ID NO. 117, CDR-L2 as depicted in SEQ ID NO. 118 and CDR-L3 as depicted in SEQ ID NO. 119; and
(c) CDR-L1 as depicted in SEQ ID NO. 153, CDR-L2 as depicted in SEQ ID NO. 154 and CDR-L3 as depicted in SEQ ID NO. 155; and
(ii) a VH region comprising CDR-H1, CDR-H2 and CDR-H3 selected from:
(a) CDR-H1 as depicted in SEQ ID NO. 12, CDR-H2 as depicted in SEQ ID NO. 13 and CDR-H3 as depicted in SEQ ID NO. 14;
(b) CDR-H1 as depicted in SEQ ID NO. 30, CDR-H2 as depicted in SEQ ID NO. 31 and CDR-H3 as depicted in SEQ ID NO. 32;
(c) CDR-H1 as depicted in SEQ ID NO. 48, CDR-H2 as depicted in SEQ ID NO. 49 and CDR-H3 as depicted in SEQ ID NO. 50;
(d) CDR-H1 as depicted in SEQ ID NO. 66, CDR-H2 as depicted in SEQ ID NO. 67 and CDR-H3 as depicted in SEQ ID NO. 68;
(e) CDR-H1 as depicted in SEQ ID NO. 84, CDR-H2 as depicted in SEQ ID NO. 85 and CDR-H3 as depicted in SEQ ID NO. 86;
(f) CDR-H1 as depicted in SEQ ID NO. 102, CDR-H2 as depicted in SEQ ID NO. 103 and CDR-H3 as depicted in SEQ ID NO. 104;
(g) CDR-H1 as depicted in SEQ ID NO. 120, CDR-H2 as depicted in SEQ ID NO. 121 and CDR-H3 as depicted in SEQ ID NO. 122;
(h) CDR-H1 as depicted in SEQ ID NO. 138, CDR-H2 as depicted in SEQ ID NO. 139 and CDR-H3 as depicted in SEQ ID NO. 140;
(i) CDR-H1 as depicted in SEQ ID NO. 156, CDR-H2 as depicted in SEQ ID NO. 157 and CDR-H3 as depicted in SEQ ID NO. 158; and
(j) CDR-H1 as depicted in SEQ ID NO. 174, CDR-H2 as depicted in SEQ ID NO. 175 and CDR-H3 as depicted in SEQ ID NO. 176.

4. (canceled)

5. The polypeptide of claim 3, wherein the first binding domain comprises a VL region comprising an amino acid sequence as set forth in SEQ ID NO. 35, 39, 125, 129, 161 or 165.

6. The polypeptide of claim 3, wherein the first binding domain comprises a VH region comprising an amino acid sequence as set forth in SEQ ID NO. 15, 19, 33, 37, 51, 55, 69, 73, 87, 91, 105, 109, 123, 127, 141, 145, 159, 163, 177 or 181.

7. The polypeptide of claim 3, wherein the first binding domain comprises a VL region and a VH region selected from the group consisting of:
(a) a VL region comprising an amino acid sequence as set forth in SEQ ID NO. 17 or 21 and a VH region comprising an amino acid sequence as set forth in SEQ ID NO. 15 or 19;
(b) a VL region comprising an amino acid sequence as set forth in SEQ ID NO. 35 or 39 and a VH region comprising an amino acid sequence as set forth in SEQ ID NO. 33 or 37;
(c) a VL region comprising an amino acid sequence as set forth in SEQ ID NO. 53 or 57 and a VH region comprising an amino acid sequence as set forth in SEQ ID NO. 51 or 55;
(d) a VL region comprising an amino acid sequence as set forth in SEQ ID NO. 71 or 75 and a VH region comprising an amino acid sequence as set forth in SEQ ID NO. 69 or 73;
(e) a VL region comprising an amino acid sequence as set forth in SEQ ID NO. 89 or 93 and a VH region comprising an amino acid sequence as set forth in SEQ ID NO. 87 or 91;
(f) a VL region comprising an amino acid sequence as set forth in SEQ ID NO. 107 or 111 and a VH region comprising an amino acid sequence as set forth in SEQ ID NO. 105 or 109;
(g) a VL region comprising an amino acid sequence as set forth in SEQ ID NO. 125 or 129 and a VH region comprising an amino acid sequence as set forth in SEQ ID NO. 123 or 127;
(h) a VL region comprising an amino acid sequence as set forth in SEQ ID NO. 143 or 147 and a VH region comprising an amino acid sequence as set forth in SEQ ID NO. 141 or 145;
(i) a VL region comprising an amino acid sequence as set forth in SEQ ID NO. 161 or 165 and a VH region comprising an amino acid sequence as set forth in SEQ ID NO. 159 or 163; and
(j) a VL region comprising an amino acid sequence as set forth in SEQ ID NO. 179 or 183 and a VH region comprising an amino acid sequence as set forth in SEQ ID NO. 177 or 181.

8. The polypeptide of claim 7, wherein the first binding domain comprises an amino acid sequence as set forth in SEQ ID NO: 23, 25, 41, 43, 59, 61, 77, 79, 95, 97, 113, 115, 131, 133, 149, 151, 167, 169, 185 or 187.

9. The polypeptide of claim 1, wherein the polypeptide is a bispecific single chain antibody.

10. The antibody of claim 9 comprising in the second binding domain a CDR-HI, CDR-H2, CDR-H3, CDR L1, CDR L2 and CDR L3 comprising the amino acid sequences set forth in SEQ ID NOS: 441-446, SEQ ID NOS: 453-458, SEQ ID NOS: 463-468, or SEQ ID NOS: 481-486.

11. The antibody of claim 9 comprising an amino acid sequence selected from the group consisting of:
(a) an amino acid sequence as depicted in any of SEQ ID NOs: 389, 391, 393, 395, 397, 399, 409, 411, 413, 415, 417, 419, 429, 431, 433, 435, 437, 439, 447, 449, 451, 469, 471, 473, 475, 477, 479, 495, 497, 499, 501, 503 and 505; and
(b) an amino acid sequence encoded by a nucleic acid sequence as depicted in any of SEQ ID NOs: 390, 392, 394, 396, 398, 400, 410, 412, 414, 416, 418, 420, 430, 432, 434, 436, 438, 440, 448, 450, 452, 470, 472, 474, 476, 478, 480, 496, 498, 500, 502, 504 and 506.

12. A nucleic acid sequence encoding the polypeptide of claim 1.

13. A vector, which comprises the nucleic acid sequence of claim 12.

14-15. (canceled)

16. A host cell transformed or transfected with the nucleic acid of claim 12.

17. A process for producing the polypeptide of claim 1, said process comprising culturing the host cell of claim 16 under conditions allowing the expression of the polypeptide.

18. A pharmaceutical composition comprising the polypeptide of claim 1 and a carrier, stabilizer, or excipient.

19-27. (canceled)

28. A method for preventing, treating, or ameliorating a disease in a subject in the need thereof, said method comprising the step of administering an effective amount of the pharmaceutical composition of claim 18 to the subject.

29. The method of claim 28, wherein said disease is a proliferative disease, a tumorous disease, or an immunological disorder.

30. The method of claim 29, wherein said tumorous disease is a malignant disease.

31. The method of claim 28, wherein said pharmaceutical composition is administered in combination with an additional drug.

32-33. (canceled)

34. The method of claim 28, wherein said subject is a human subject.

35. A kit comprising the polypeptide of claim 1.

The application's sequence listing, which the Patent Office published only in electronic form, follows.

SEQUENCE LISTING (551 sequences)

SEQ ID NO: 1 - protein, 105 aa, Homo sapiens
QDGNEEMGGITQTPYKVSISGTTVILTCPQYPGSEILWQHNDKNIGGDEDDKNIGSDEDHLSLKEFSELEQSGYYVCYPRGSKPEDANFYLYLRARVCENCMEMD

SEQ ID NO: 2 - protein, 27 aa, Homo sapiens
QDGNEEMGGITQTPYKVSISGTTVILT

SEQ ID NO: 3 - protein, 96 aa, Callithrix jacchus
QDGNEEMGDTTQNPYKVSISGTTVTLTCPRYDGHEIKWLVNSQNKEGHEDHLLLEDFSEMEQSGYYACLSKETPAEEASHYLYLKARVCENCVEVD

SEQ ID NO: 4 - protein, 27 aa, Callithrix jacchus
QDGNEEMGDTTQNPYKVSISGTTVTLT

SEQ ID NO: 5 - protein, 96 aa, Saguinus oedipus; identical to SEQ ID NO: 3

SEQ ID NO: 6 - protein, 27 aa, Saguinus oedipus
QDGNEEMGDTTQNPYKVSISGTTVTLT

SEQ ID NO: 7 - protein, 96 aa, Saimiri sciureus
QDGNEEIGDTTQNPYKVSISGTTVTLTCPRYDGQEIKWLVNDQNKEGHEDHLLLEDFSEMEQSGYYACLSKETPTEEASHYLYLKARVCENCVEVD

SEQ ID NO: 8 - protein, 27 aa, Saimiri sciureus
QDGNEEIGDTTQNPYKVSISGTTVTLT

SEQ ID NO: 9 - protein, 14 aa, Artificial Sequence
  CDR-L1 of F6A
GSSTGAVTSGYYPN

SEQ ID NO: 10 - protein, 7 aa, Artificial Sequence
  CDR-L2 of F6A
GTKFLAP

SEQ ID NO: 11 - protein, 9 aa, Artificial Sequence
  CDR-L3 of F6A
ALWYSNRWV

SEQ ID NO: 12 - protein, 5 aa, Artificial Sequence
  CDR-H1 of F6A
IYAMN

SEQ ID NO: 13 - protein, 19 aa, Artificial Sequence
  CDR-H2 of F6A
RIRSKYNNYATYYADSVKS

SEQ ID NO: 14 - protein, 14 aa, Artificial Sequence
  CDR-H3 of F6A
HGNFGNSYVSFFAY

SEQ ID NO: 15 - protein, 125 aa, Artificial Sequence
  VH of F6A
EVQLVESGGGLVQPGGSLKLSCAASGFTFNIYAMNWVRQAPGKGLEWVARIRSKYNNYATYYADSVKSRFTISRDDSKNTAYLQMNNLKTEDTAVYYCVRHGNFGNSYVSFFAYWGQGTLVTVSS

SEQ ID NO: 16 - DNA, 375 bp, Artificial Sequence
  VH of F6A
gaggtgcagctggtcgagtctggaggaggattggtgcagcctggagggtcattgaaactctcatgtgcagcctctggattcaccttcaatatctacgccatgaactgggtccgccaggctccaggaaagggtttggaatgggttgctcgcataagaagtaaatataataattatgcaacatattatgccgattcagtgaaaagcaggttcaccatctccagagatgattcaaaaaacactgcctatctacaaatgaacaacttgaaaactgaggacactgccgtgtactactgtgtgagacatgggaacttcggtaatagctacgtatccttcttcgcttactggggccaagggactctggtcaccgtctcctca

SEQ ID NO: 17 - protein, 109 aa, Artificial Sequence
  VL of F6A
QTVVTQEPSLTVSPGGTVTLTCGSSTGAVTSGYYPNWVQQKPGQAPRGLIGGTKFLAPGTPARFSGSLLGGKAALTLSGVQPEDEAEYYCALWYSNRWVFGGGTKLTVL

SEQ ID NO: 18 - DNA, 327 bp, Artificial Sequence
  VL of F6A
cagactgttgtgactcaggaaccttcactcaccgtatcacctggtggaacagtcacactcacttgtggctcctcgactggggctgttacatctggctactacccaaactgggtccaacaaaaaccaggtcaggcaccccgtggtctaataggtgggactaagttcctcgcccccggtactcctgccagattctcaggctccctgcttggaggcaaggctgccctcaccctctcaggggtacagccagaggatgaggcagaatattactgtgctctatggtacagcaaccgctgggtgttcggtggaggaaccaaactgactgtccta

SEQ ID NO: 19 - protein, 125 aa, Artificial Sequence
  VH-P of F6A
EVQLLESGGGLVQPGGSLKLSCAASGFTFNIYAMNWVRQAPGKGLEWVARIRSKYNNYATYYADSVKSRFTISRDDSKNTAYLQMNNLKTEDTAVYYCVRHGNFGNSYVSFFAYWGQGTLVTVSS

SEQ ID NO: 20 - DNA, 375 bp, Artificial Sequence
  VH-P of F6A
gaggtgcagctgctcgagtctggaggaggattggtgcagcctggagggtcattgaaactctcatgtgcagcctctggattcaccttcaatatctacgccatgaactgggtccgccaggctccaggaaagggtttggaatgggttgctcgcataagaagtaaatataataattatgcaacatattatgccgattcagtgaaaagcaggttcaccatctccagagatgattcaaaaaacactgcctatctacaaatgaacaacttgaaaactgaggacactgccgtgtactactgtgtgagacatgggaacttcggtaatagctacgtatccttcttcgcttactggggccaagggactctggtcaccgtctcctca

SEQ ID NO: 21 - protein, 109 aa, Artificial Sequence
  VL-P of F6A
ELVVTQEPSLTVSPGGTVTLTCGSSTGAVTSGYYPNWVQQKPGQAPRGLIGGTKFLAPGTPARFSGSLLGGKAALTLSGVQPEDEAEYYCALWYSNRWVFGGGTKLTVL

SEQ ID NO: 22 - DNA, 327 bp, Artificial Sequence
  VL-P of F6A
gagctcgttgtgactcaggaaccttcactcaccgtatcacctggtggaacagtcacactcacttgtggctcctcgactggggctgttacatctggctactacccaaactgggtccaacaaaaaccaggtcaggcaccccgtggtctaataggtgggactaagttcctcgcccccggtactcctgccagattctcaggctccctgcttggaggcaaggctgccctcaccctctcaggggtacagccagaggatgaggcagaatattactgtgctctatggtacagcaaccgctgggtgttcggtggaggaaccaaactgactgtccta

SEQ ID NO: 23 - protein, 249 aa, Artificial Sequence
  VH-VL of F6A
EVQLVESGGGLVQPGGSLKLSCAASGFTFNIYAMNWVRQAPGKGLEWVARIRSKYNNYATYYADSVKSRFTISRDDSKNTAYLQMNNLKTEDTAVYYCVRHGNFGNSYVSFFAYWGQGTLVTVSSGGGGSGGGGSGGGGSQTVVTQEPSLTVSPGGTVTLTCGSSTGAVTSGYYPNWVQQKPGQAPRGLIGGTKFLAPGTPARFSGSLLGGKAALTLSGVQPEDEAEYYCALWYSNRWVFGGGTKLTVL

SEQ ID NO: 24 - DNA, 747 bp, Artificial Sequence
  VH-VL of F6A
gaggtgcagctggtcgagtctggaggaggattggtgcagcctggagggtcattgaaactctcatgtgcagcctctggattcaccttcaatatctacgccatgaactgggtccgccaggctccaggaaagggtttggaatgggttgctcgcataagaagtaaatataataattatgcaacatattatgccgattcagtgaaaagcaggttcaccatctccagagatgattcaaaaaacactgcctatctacaaatgaacaacttgaaaactgaggacactgccgtgtactactgtgtgagacatgggaacttcggtaatagctacgtatccttcttcgcttactggggccaagggactctggtcaccgtctcctcaggtggtggtggttctggcggcggcggctccggtggtggtggttctcagactgttgtgactcaggaaccttcactcaccgtatcacctggtggaacagtcacactcacttgtggctcctcgactggggctgttacatctggctactacccaaactgggtccaacaaaaaccaggtcaggcaccccgtggtctaataggtgggactaagttcctcgcccccggtactcctgccagattctcaggctccctgcttggaggcaaggctgccctcaccctctcaggggtacagccagaggatgaggcagaatattactgtgctctatggtacagcaaccgctgggtgttcggtggaggaaccaaactgactgtccta

SEQ ID NO: 25 - protein, 249 aa, Artificial Sequence
  VH-VL-P of F6A
EVQLLESGGGLVQPGGSLKLSCAASGFTFNIYAMNWVRQAPGKGLEWVARIRSKYNNYATYYADSVKSRFTISRDDSKNTAYLQMNNLKTEDTAVYYCVRHGNFGNSYVSFFAYWGQGTLVTVSSGGGGSGGGGSGGGGSELVVTQEPSLTVSPGGTVTLTCGSSTGAVTSGYYPNWVQQKPGQAPRGLIGGTKFLAPGTPARFSGSLLGGKAALTLSGVQPEDEAEYYCALWYSNRWVFGGGTKLTVL

SEQ ID NO: 26 - DNA, 747 bp, Artificial Sequence
  VH-VL-P of F6A
gaggtgcagctgctcgagtctggaggaggattggtgcagcctggagggtcattgaaactctcatgtgcagcctctggattcaccttcaatatctacgccatgaactgggtccgccaggctccaggaaagggtttggaatgggttgctcgcataagaagtaaatataataattatgcaacatattatgccgattcagtgaaaagcaggttcaccatctccagagatgattcaaaaaacactgcctatctacaaatgaacaacttgaaaactgaggacactgccgtgtactactgtgtgagacatgggaacttcggtaatagctacgtatccttcttcgcttactggggccaagggactctggtcaccgtctcctcaggtggtggtggttctggcggcggcggctccggtggtggtggttctgagctcgttgtgactcaggaaccttcactcaccgtatcacctggtggaacagtcacactcacttgtggctcctcgactggggctgttacatctggctactacccaaactgggtccaacaaaaaccaggtcaggcaccccgtggtctaataggtgggactaagttcctcgcccccggtactcctgccagattctcaggctccctgcttggaggcaaggctgccctcaccctctcaggggtacagccagaggatgaggcagaatattactgtgctctatggtacagcaaccgctgggtgttcggtggaggaaccaaactgactgtccta

SEQ ID NO: 27 - protein, 14 aa, Artificial Sequence
  CDR-L1 of H2C
GSSTGAVTSGYYPN

SEQ ID NO: 28 - protein, 7 aa, Artificial Sequence
  CDR-L2 of H2C
GTKFLAP

SEQ ID NO: 29 - protein, 9 aa, Artificial Sequence
  CDR-L3 of H2C
ALWYSNRWV

SEQ ID NO: 30 - protein, 5 aa, Artificial Sequence
  CDR-H1 of H2C
KYAMN

SEQ ID NO: 31 - protein, 19 aa, Artificial Sequence
  CDR-H2 of H2C
RIRSKYNNYATYYADSVKD

SEQ ID NO: 32 - protein, 14 aa, Artificial Sequence
  CDR-H3 of H2C
HGNFGNSYISYWAY

SEQ ID NO: 33 - protein, 125 aa, Artificial Sequence
  VH of H2C
EVQLVESGGGLVQPGGSLKLSCAASGFTFNKYAMNWVRQAPGKGLEWVARIRSKYNNYATYYADSVKDRFTISRDDSKNTAYLQMNNLKTEDTAVYYCVRHGNFGNSYISYWAYWGQGTLVTVSS

SEQ ID NO: 34 - DNA, 375 bp, Artificial Sequence
  VH of H2C
gaggtgcagctggtcgagtctggaggaggattggtgcagcctggagggtcattgaaactctcatgtgcagcctctggattcaccttcaataagtacgccatgaactgggtccgccaggctccaggaaagggtttggaatgggttgctcgcataagaagtaaatataataattatgcaacatattatgccgattcagtgaaagacaggttcaccatctccagagatgattcaaaaaacactgcctatctacaaatgaacaacttgaaaactgaggacactgccgtgtactactgtgtgagacatgggaacttcggtaatagctacatatcctactgggcttactggggccaagggactctggtcaccgtctcctca

SEQ ID NO: 35 - protein, 109 aa, Artificial Sequence; identical to SEQ ID NO: 17
  VL of H2C

SEQ ID NO: 36 - DNA, 327 bp, Artificial Sequence; identical to SEQ ID NO: 18
  VL of H2C

SEQ ID NO: 37 - protein, 125 aa, Artificial Sequence
  VH-P of H2C
EVQLLESGGGLVQPGGSLKLSCAASGFTFNKYAMNWVRQAPGKGLEWVARIRSKYNNYATYYADSVKDRFTISRDDSKNTAYLQMNNLKTEDTAVYYCVRHGNFGNSYISYWAYWGQGTLVTVSS

SEQ ID NO: 38 - DNA, 375 bp, Artificial Sequence
  VH-P of H2C
gaggtgcagctgctcgagtctggaggaggattggtgcagcctggagggtcattgaaactctcatgtgcagcctctggattcaccttcaataagtacgccatgaactgggtccgccaggctccaggaaagggtttggaatgggttgctcgcataagaagtaaatataataattatgcaacatattatgccgattcagtgaaagacaggttcaccatctccagagatgattcaaaaaacactgcctatctacaaatgaacaacttgaaaactgaggacactgccgtgtactactgtgtgagacatgggaacttcggtaatagctacatatcctactgggcttactggggccaagggactctggtcaccgtctcctca

SEQ ID NO: 39 - protein, 109 aa, Artificial Sequence; identical to SEQ ID NO: 21
  VL-P of H2C

SEQ ID NO: 40 - DNA, 327 bp, Artificial Sequence; identical to SEQ ID NO: 22
  VL-P of H2C

SEQ ID NO: 41 - protein, 249 aa, Artificial Sequence
  VH-VL of H2C
EVQLVESGGGLVQPGGSLKLSCAASGFTFNKYAMNWVRQAPGKGLEWVARIRSKYNNYATYYADSVKDRFTISRDDSKNTAYLQMNNLKTEDTAVYYCVRHGNFGNSYISYWAYWGQGTLVTVSSGGGGSGGGGSGGGGSQTVVTQEPSLTVSPGGTVTLTCGSSTGAVTSGYYPNWVQQKPGQAPRGLIGGTKFLAPGTPARFSGSLLGGKAALTLSGVQPEDEAEYYCALWYSNRWVFGGGTKLTVL

SEQ ID NO: 42 - DNA, 747 bp, Artificial Sequence
  VH-VL of H2C
gaggtgcagctggtcgagtctggaggaggattggtgcagcctggagggtcattgaaactctcatgtgcagcctctggattcaccttcaataagtacgccatgaactgggtccgccaggctccaggaaagggtttggaatgggttgctcgcataagaagtaaatataataattatgcaacatattatgccgattcagtgaaagacaggttcaccatctccagagatgattcaaaaaacactgcctatctacaaatgaacaacttgaaaactgaggacactgccgtgtactactgtgtgagacatgggaacttcggtaatagctacatatcctactgggcttactggggccaagggactctggtcaccgtctcctcaggtggtggtggttctggcggcggcggctccggtggtggtggttctcagactgttgtgactcaggaaccttcactcaccgtatcacctggtggaacagtcacactcacttgtggctcctcgactggggctgttacatctggctactacccaaactgggtccaacaaaaaccaggtcaggcaccccgtggtctaataggtgggactaagttcctcgcccccggtactcctgccagattctcaggctccctgcttggaggcaaggctgccctcaccctctcaggggtacagccagaggatgaggcagaatattactgtgctctatggtacagcaaccgctgggtgttcggtggaggaaccaaactgactgtccta

SEQ ID NO: 43 - protein, 249 aa, Artificial Sequence
  VH-VL-P of H2C
EVQLLESGGGLVQPGGSLKLSCAASGFTFNKYAMNWVRQAPGKGLEWVARIRSKYNNYATYYADSVKDRFTISRDDSKNTAYLQMNNLKTEDTAVYYCVRHGNFGNSYISYWAYWGQGTLVTVSSGGGGSGGGGSGGGGSELVVTQEPSLTVSPGGTVTLTCGSSTGAVTSGYYPNWVQQKPGQAPRGLIGGTKFLAPGTPARFSGSLLGGKAALTLSGVQPEDEAEYYCALWYSNRWVFGGGTKLTVL

SEQ ID NO: 44 - DNA, 747 bp, Artificial Sequence
  VH-VL-P of H2C
gaggtgcagctgctcgagtctggaggaggattggtgcagcctggagggtcattgaaactctcatgtgcagcctctggattcaccttcaataagtacgccatgaactgggtccgccaggctccaggaaagggtttggaatgggttgctcgcataagaagtaaatataataattatgcaacatattatgccgattcagtgaaagacaggttcaccatctccagagatgattcaaaaaacactgcctatctacaaatgaacaacttgaaaactgaggacactgccgtgtactactgtgtgagacatgggaacttcggtaatagctacatatcctactgggcttactggggccaagggactctggtcaccgtctcctcaggtggtggtggttctggcggcggcggctccggtggtggtggttctgagctcgttgtgactcaggaaccttcactcaccgtatcacctggtggaacagtcacactcacttgtggctcctcgactggggctgttacatctggctactacccaaactgggtccaacaaaaaccaggtcaggcaccccgtggtctaataggtgggactaagttcctcgcccccggtactcctgccagattctcaggctccctgcttggaggcaaggctgccctcaccctctcaggggtacagccagaggatgaggcagaatattactgtgctctatggtacagcaaccgctgggtgttcggtggaggaaccaaactgactgtccta

SEQ ID NO: 45 - protein, 14 aa, Artificial Sequence
  CDR-L1 of H1E
GSSTGAVTSGYYPN

SEQ ID NO: 46 - protein, 7 aa, Artificial Sequence
  CDR-L2 of H1E
GTKFLAP

SEQ ID NO: 47 - protein, 9 aa, Artificial Sequence
  CDR-L3 of H1E
ALWYSNRWV

SEQ ID NO: 48 - protein, 5 aa, Artificial Sequence
  CDR-H1 of H1E
SYAMN

SEQ ID NO: 49 - protein, 19 aa, Artificial Sequence
  CDR-H2 of H1E
RIRSKYNNYATYYADSVKG

SEQ ID NO: 50 - protein, 14 aa, Artificial Sequence
  CDR-H3 of H1E
HGNFGNSYLSFWAY

SEQ ID NO: 51 - protein, 125 aa, Artificial Sequence
  VH of H1E
EVQLVESGGGLEQPGGSLKLSCAASGFTFNSYAMNWVRQAPGKGLEWVARIRSKYNNYATYYADSVKGRFTISRDDSKNTAYLQMNNLKTEDTAVYYCVRHGNFGNSYLSFWAYWGQGTLVTVSS

SEQ ID NO: 52 - DNA, 374 bp, Artificial Sequence
  VH of H1E
gaggtgcagctggtcgagtctggaggaggattggagcagcctggagggtcattgaaactctcatgtgcagcctctggattcaccttcaattcgtacgccatgaactgggtccgccaggctccaggaaagggtttggaatgggttgctcgcataagaagtaaatataataattatgcaacatattatgccgattcagtgaaagggaggttcaccatctccagagatgattcaaaaaacactgcctatctacaaatgaacaacttgaaaactgaggacactgccgtgtactactgtgtgagacatgggaacttcggtaatagctacctatccttctgggcttactggggccaagggactctggtcaccgtctcctc

SEQ ID NO: 53 - protein, 109 aa, Artificial Sequence; identical to SEQ ID NO: 17
  VL of H1E

SEQ ID NO: 54 - DNA, 327 bp, Artificial Sequence; identical to SEQ ID NO: 18
  VL of H1E

SEQ ID NO: 55 - protein, 125 aa, Artificial Sequence
  VH-P of H1E
EVQLLESGGGLEQPGGSLKLSCAASGFTFNSYAMNWVRQAPGKGLEWVARIRSKYNNYATYYADSVKGRFTISRDDSKNTAYLQMNNLKTEDTAVYYCVRHGNFGNSYLSFWAYWGQGTLVTVSS

SEQ ID NO: 56 - DNA, 375 bp, Artificial Sequence
  VH-P of H1E
gaggtgcagctgctcgagtctggaggaggattggagcagcctggagggtcattgaaactctcatgtgcagcctctggattcaccttcaattcgtacgccatgaactgggtccgccaggctccaggaaagggtttggaatgggttgctcgcataagaagtaaatataataattatgcaacatattatgccgattcagtgaaagggaggttcaccatctccagagatgattcaaaaaacactgcctatctacaaatgaacaacttgaaaactgaggacactgccgtgtactactgtgtgagacatgggaacttcggtaatagctacctatccttctgggcttactggggccaagggactctggtcaccgtctcctca

SEQ ID NO: 57 - protein, 109 aa, Artificial Sequence; identical to SEQ ID NO: 21
  VL-P of H1E

SEQ ID NO: 58 - DNA, 327 bp, Artificial Sequence; identical to SEQ ID NO: 22
  VL-P of H1E

SEQ ID NO: 59 - protein, 249 aa, Artificial Sequence
  VH-VL of H1E
EVQLVESGGGLEQPGGSLKLSCAASGFTFNSYAMNWVRQAPGKGLEWVARIRSKYNNYATYYADSVKGRFTISRDDSKNTAYLQMNNLKTEDTAVYYCVRHGNFGNSYLSFWAYWGQGTLVTVSSGGGGSGGGGSGGGGSQTVVTQEPSLTVSPGGTVTLTCGSSTGAVTSGYYPNWVQQKPGQAPRGLIGGTKFLAPGTPARFSGSLLGGKAALTLSGVQPEDEAEYYCALWYSNRWVFGGGTKLTVL

SEQ ID NO: 60 - DNA, 747 bp, Artificial Sequence
  VH-VL of H1E
gaggtgcagctggtcgagtctggaggaggattggagcagcctggagggtcattgaaactctcatgtgcagcctctggattcaccttcaattcgtacgccatgaactgggtccgccaggctccaggaaagggtttggaatgggttgctcgcataagaagtaaatataataattatgcaacatattatgccgattcagtgaaagggaggttcaccatctccagagatgattcaaaaaacactgcctatctacaaatgaacaacttgaaaactgaggacactgccgtgtactactgtgtgagacatgggaacttcggtaatagctacctatccttctgggcttactggggccaagggactctggtcaccgtctcctcaggtggtggtggttctggcggcggcggctccggtggtggtggttctcagactgttgtgactcaggaaccttcactcaccgtatcacctggtggaacagtcacactcacttgtggctcctcgactggggctgttacatctggctactacccaaactgggtccaacaaaaaccaggtcaggcaccccgtggtctaataggtgggactaagttcctcgcccccggtactcctgccagattctcaggctccctgcttggaggcaaggctgccctcaccctctcaggggtacagccagaggatgaggcagaatattactgtgctctatggtacagcaaccgctgggtgttcggtggaggaaccaaactgactgtccta

SEQ ID NO: 61 - protein, 249 aa, Artificial Sequence
  VH-VL-P of H1E
EVQLLESGGGLEQPGGSLKLSCAASGFTFNSYAMNWVRQAPGKGLEWVARIRSKYNNYATYYADSVKGRFTISRDDSKNTAYLQMNNLKTEDTAVYYCVRHGNFGNSYLSFWAYWGQGTLVTVSSGGGGSGGGGSGGGGSELVVTQEPSLTVSPGGTVTLTCGSSTGAVTSGYYPNWVQQKPGQAPRGLIGGTKFLAPGTPARFSGSLLGGKAALTLSGVQPEDEAEYYCALWYSNRWVFGGGTKLTVL

SEQ ID NO: 62 - DNA, 747 bp, Artificial Sequence
  VH-VL-P of H1E
gaggtgcagctgctcgagtctggaggaggattggagcagcctggagggtcattgaaactctcatgtgcagcctctggattcaccttcaattcgtacgccatgaactgggtccgccaggctccaggaaagggtttggaatgggttgctcgcataagaagtaaatataataattatgcaacatattatgccgattcagtgaaagggaggttcaccatctccagagatgattcaaaaaacactgcctatctacaaatgaacaacttgaaaactgaggacactgccgtgtactactgtgtgagacatgggaacttcggtaatagctacctatccttctgggcttactggggccaagggactctggtcaccgtctcctcaggtggtggtggttctggcggcggcggctccggtggtggtggttctgagctcgttgtgactcaggaaccttcactcaccgtatcacctggtggaacagtcacactcacttgtggctcctcgactggggctgttacatctggctactacccaaactgggtccaacaaaaaccaggtcaggcaccccgtggtctaataggtgggactaagttcctcgcccccggtactcctgccagattctcaggctccctgcttggaggcaaggctgccctcaccctctcaggggtacagccagaggatgaggcagaatattactgtgctctatggtacagcaaccgctgggtgttcggtggaggaaccaaactgactgtccta

SEQ ID NO: 63 - protein, 14 aa, Artificial Sequence
  CDR-L1 of G4H
GSSTGAVTSGYYPN

SEQ ID NO: 64 - protein, 7 aa, Artificial Sequence
  CDR-L2 of G4H
GTKFLAP

SEQ ID NO: 65 - protein, 9 aa, Artificial Sequence
  CDR-L3 of G4H
ALWYSNRWV

SEQ ID NO: 66 - protein, 5 aa, Artificial Sequence
  CDR-H1 of G4H
RYAMN

SEQ ID NO: 67 - protein, 19 aa, Artificial Sequence
  CDR-H2 of G4H
RIRSKYNNYATYYADSVKG

SEQ ID NO: 68 - protein, 14 aa, Artificial Sequence
  CDR-H3 of G4H
HGNFGNSYLSYFAY

SEQ ID NO: 69 - protein, 125 aa, Artificial Sequence
  VH of G4H
EVQLVESGGGLVQPGGSLKLSCAASGFTFNRYAMNWVRQAPGKGLEWVARIRSKYNNYATYYADSVKGRFTISRDDSKNTAYLQMNNLKTEDTAVYYCVRHGNFGNSYLSYFAYWGQGTLVTVSS

SEQ ID NO: 70 - DNA, 375 bp, Artificial Sequence
  VH of G4H
gaggtgcagctggtcgagtctggaggaggattggtgcagcctggagggtcattgaaactctcatgtgcagcctctggattcaccttcaatcgctacgccatgaactgggtccgccaggctccaggaaagggtttggaatgggttgctcgcataagaagtaaatataataattatgcaacatattatgccgattcagtgaaagggaggttcaccatctccagagatgattcaaaaaacactgcctatctacaaatgaacaacttgaaaactgaggacactgccgtgtactactgtgtgagacatgggaacttcggtaatagctacttatcctacttcgcttactggggccaagggactctggtcaccgtctcctca

SEQ ID NO: 71 - protein, 109 aa, Artificial Sequence; identical to SEQ ID NO: 17
  VL of G4H

SEQ ID NO: 72 - DNA, 327 bp, Artificial Sequence; identical to SEQ ID NO: 18
  VL of G4H

SEQ ID NO: 73 - protein, 125 aa, Artificial Sequence
  VH-P of G4H
EVQLLESGGGLVQPGGSLKLSCAASGFTFNRYAMNWVRQAPGKGLEWVARIRSKYNNYATYYADSVKGRFTISRDDSKNTAYLQMNNLKTEDTAVYYCVRHGNFGNSYLSYFAYWGQGTLVTVSS

SEQ ID NO: 74 - DNA, 375 bp, Artificial Sequence
  VH-P of G4H
gaggtgcagctgctcgagtctggaggaggattggtgcagcctggagggtcattgaaactctcatgtgcagcctctggattcaccttcaatcgctacgccatgaactgggtccgccaggctccaggaaagggtttggaatgggttgctcgcataagaagtaaatataataattatgcaacatattatgccgattcagtgaaagggaggttcaccatctccagagatgattcaaaaaacactgcctatctacaaatgaacaacttgaaaactgaggacactgccgtgtactactgtgtgagacatgggaacttcggtaatagctacttatcctacttcgcttactggggccaagggactctggtcaccgtctcctca

SEQ ID NO: 75 - protein, 109 aa, Artificial Sequence; identical to SEQ ID NO: 21
  VL-P of G4H

SEQ ID NO: 76 - DNA, 327 bp, Artificial Sequence; identical to SEQ ID NO: 22
  VL-P of G4H

SEQ ID NO: 77 - protein, 249 aa, Artificial Sequence
  VH-VL of G4H
EVQLVESGGGLVQPGGSLKLSCAASGFTFNRYAMNWVRQAPGKGLEWVARIRSKYNNYATYYADSVKGRFTISRDDSKNTAYLQMNNLKTEDTAVYYCVRHGNFGNSYLSYFAYWGQGTLVTVSSGGGGSGGGGSGGGGSQTVVTQEPSLTVSPGGTVTLTCGSSTGAVTSGYYPNWVQQKPGQAPRGLIGGTKFLAPGTPARFSGSLLGGKAALTLSGVQPEDEAEYYCALWYSNRWVFGGGTKLTVL

SEQ ID NO: 78 - DNA, 747 bp, Artificial Sequence
  VH-VL of G4H
gaggtgcagctggtcgagtctggaggaggattggtgcagcctggagggtcattgaaactctcatgtgcagcctctggattcaccttcaatcgctacgccatgaactgggtccgccaggctccaggaaagggtttggaatgggttgctcgcataagaagtaaatataataattatgcaacatattatgccgattcagtgaaagggaggttcaccatctccagagatgattcaaaaaacactgcctatctacaaatgaacaacttgaaaactgaggacactgccgtgtactactgtgtgagacatgggaacttcggtaatagctacttatcctacttcgcttactggggccaagggactctggtcaccgtctcctcaggtggtggtggttctggcggcggcggctccggtggtggtggttctcagactgttgtgactcaggaaccttcactcaccgtatcacctggtggaacagtcacactcacttgtggctcctcgactggggctgttacatctggctactacccaaactgggtccaacaaaaaccaggtcaggcaccccgtggtctaataggtgggactaagttcctcgcccccggtactcctgccagattctcaggctccctgcttggaggcaaggctgccctcaccctctcaggggtacagccagaggatgaggcagaatattactgtgctctatggtacagcaaccgctgggtgttcggtggaggaaccaaactgactgtccta

SEQ ID NO: 79 - protein, 249 aa, Artificial Sequence
  VH-VL-P of G4H
EVQLLESGGGLVQPGGSLKLSCAASGFTFNRYAMNWVRQAPGKGLEWVARIRSKYNNYATYYADSVKGRFTISRDDSKNTAYLQMNNLKTEDTAVYYCVRHGNFGNSYLSYFAYWGQGTLVTVSSGGGGSGGGGSGGGGSELVVTQEPSLTVSPGGTVTLTCGSSTGAVTSGYYPNWVQQKPGQAPRGLIGGTKFLAPGTPARFSGSLLGGKAALTLSGVQPEDEAEYYCALWYSNRWVFGGGTKLTVL

SEQ ID NO: 80 - DNA, 747 bp, Artificial Sequence
  VH-VL-P of G4H
gaggtgcagctgctcgagtctggaggaggattggtgcagcctggagggtcattgaaactctcatgtgcagcctctggattcaccttcaatcgctacgccatgaactgggtccgccaggctccaggaaagggtttggaatgggttgctcgcataagaagtaaatataataattatgcaacatattatgccgattcagtgaaagggaggttcaccatctccagagatgattcaaaaaacactgcctatctacaaatgaacaacttgaaaactgaggacactgccgtgtactactgtgtgagacatgggaacttcggtaatagctacttatcctacttcgcttactggggccaagggactctggtcaccgtctcctcaggtggtggtggttctggcggcggcggctccggtggtggtggttctgagctcgttgtgactcaggaaccttcactcaccgtatcacctggtggaacagtcacactcacttgtggctcctcgactggggctgttacatctggctactacccaaactgggtccaacaaaaaccaggtcaggcaccccgtggtctaataggtgggactaagttcctcgcccccggtactcctgccagattctcaggctccctgcttggaggcaaggctgccctcaccctctcaggggtacagccagaggatgaggcagaatattactgtgctctatggtacagcaaccgctgggtgttcggtggaggaaccaaactgactgtccta

SEQ ID NO: 81 - protein, 14 aa, Artificial Sequence
  CDR-L1 of A2J
RSSTGAVTSGYYPN

SEQ ID NO: 82 - protein, 7 aa, Artificial Sequence
  CDR-L2 of A2J
ATDMRPS

SEQ ID NO: 83 - protein, 9 aa, Artificial Sequence
  CDR-L3 of A2J
ALWYSNRWV

SEQ ID NO: 84 - protein, 5 aa, Artificial Sequence
  CDR-H1 of A2J
VYAMN

SEQ ID NO: 85 - protein, 19 aa, Artificial Sequence
  CDR-H2 of A2J
RIRSKYNNYATYYADSVKK

SEQ ID NO: 86 - protein, 14 aa, Artificial Sequence
  CDR-H3 of A2J
HGNFGNSYLSWWAY

SEQ ID NO: 87 - protein, 125 aa, Artificial Sequence
  VH of A2J
EVQLVESGGGLVQPGGSLKLSCAASGFTFNVYAMNWVRQAPGKGLEWVARIRSKYNNYATYYADSVKKRFTISRDDSKNTAYLQMNNLKTEDTAVYYCVRHGNFGNSYLSWWAYWGQGTLVTVSS

SEQ ID NO: 88 - DNA, 375 bp, Artificial Sequence
  VH of A2J
gaggtgcagctggtcgagtctggaggaggattggtgcagcctggagggtcattgaaactctcatgtgcagcctctggattcaccttcaatgtctacgccatgaactgggtccgccaggctccaggaaagggtttggaatgggttgctcgcataagaagtaaatataataattatgcaacatattatgccgattcagtgaaaaagaggttcaccatctccagagatgattcaaaaaacactgcctatctacaaatgaacaacttgaaaactgaggacactgccgtgtactactgtgtgagacatgggaacttcggtaatagctacttatcctggtgggcttactggggccaagggactctggtcaccgtctcctca

SEQ ID NO: 89 - protein, 109 aa, Artificial Sequence
  VL of A2J
QTVVTQEPSLTVSPGGTVTLTCRSSTGAVTSGYYPNWVQQKPGQAPRGLIGATDMRPSGTPARFSGSLLGGKAALTLSGVQPEDEAEYYCALWYSNRWVFGGGTKLTVL

SEQ ID NO: 90 - DNA, 327 bp, Artificial Sequence
  VL of A2J
cagactgttgtgactcaggaaccttcactcaccgtatcacctggtggaacagtcacactcacttgtcgctcctcgactggggctgttacatctggctactacccaaactgggtccaacaaaaaccaggtcaggcaccccgtggtctaataggtgccactgacatgaggccctctggtactcctgccagattctcaggctccctgcttggaggcaaggctgccctcaccctctcaggggtacagccagaggatgaggcagaatattactgtgctctatggtacagcaaccgctgggtgttcggtggaggaaccaaactgactgtccta

SEQ ID NO: 91 - protein, 125 aa, Artificial Sequence
  VH-P of A2J
EVQLLESGGGLVQPGGSLKLSCAASGFTFNVYAMNWVRQAPGKGLEWVARIRSKYNNYATYYADSVKKRFTISRDDSKNTAYLQMNNLKTEDTAVYYCVRHGNFGNSYLSWWAYWGQGTLVTVSS

SEQ ID NO: 92 - DNA, 375 bp, Artificial Sequence
  VH-P of A2J
gaggtgcagctgctcgagtctggaggaggattggtgcagcctggagggtcattgaaactctcatgtgcagcctctggattcaccttcaatgtctacgccatgaactgggtccgccaggctccaggaaagggtttggaatgggttgctcgcataagaagtaaatataataattatgcaacatattatgccgattcagtgaaaaagaggttcaccatctccagagatgattcaaaaaacactgcctatctacaaatgaacaacttgaaaactgaggacactgccgtgtactactgtgtgagacatgggaacttcggtaatagctacttatcctggtgggcttactggggccaagggactctggtcaccgtctcctca

SEQ ID NO: 93 - protein, 109 aa, Artificial Sequence
  VL-P of A2J
ELVVTQEPSLTVSPGGTVTLTCRSSTGAVTSGYYPNWVQQKPGQAPRGLIGATDMRPSGTPARFSGSLLGGKAALTLSGVQPEDEAEYYCALWYSNRWVFGGGTKLTVL

SEQ ID NO: 94 - DNA, 327 bp, Artificial Sequence
  VL-P of A2J
gagctcgttgtgactcaggaaccttcactcaccgtatcacctggtggaacagtcacactcacttgtcgctcctcgactggggctgttacatctggctactacccaaactgggtccaacaaaaaccaggtcaggcaccccgtggtctaataggtgccactgacatgaggccctctggtactcctgccagattctcaggctccctgcttggaggcaaggctgccctcaccctctcaggggtacagccagaggatgaggcagaatattactgtgctctatggtacagcaaccgctgggtgttcggtggaggaaccaaactgactgtccta

SEQ ID NO: 95 - protein, 249 aa, Artificial Sequence
  VH-VL of A2J
EVQLVESGGGLVQPGGSLKLSCAASGFTFNVYAMNWVRQAPGKGLEWVARIRSKYNNYATYYADSVKKRFTISRDDSKNTAYLQMNNLKTEDTAVYYCVRHGNFGNSYLSWWAYWGQGTLVTVSSGGGGSGGGGSGGGGSQTVVTQEPSLTVSPGGTVTLTCRSSTGAVTSGYYPNWVQQKPGQAPRGLIGATDMRPSGTPARFSGSLLGGKAALTLSGVQPEDEAEYYCALWYSNRWVFGGGTKLTVL

SEQ ID NO: 96 - DNA, 747 bp, Artificial Sequence
  VH-VL of A2J
gaggtgcagctggtcgagtctggaggaggattggtgcagcctggagggtcattgaaactctcatgtgcagcctctggattcaccttcaatgtctacgccatgaactgggtccgccaggctccaggaaagggtttggaatgggttgctcgcataagaagtaaatataataattatgcaacatattatgccgattcagtgaaaaagaggttcaccatctccagagatgattcaaaaaacactgcctatctacaaatgaacaacttgaaaactgaggacactgccgtgtactactgtgtgagacatgggaacttcggtaatagctacttatcctggtgggcttactggggccaagggactctggtcaccgtctcctcaggtggtggtggttctggcggcggcggctccggtggtggtggttctcagactgttgtgactcaggaaccttcactcaccgtatcacctggtggaacagtcacactcacttgtcgctcctcgactggggctgttacatctggctactacccaaactgggtccaacaaaaaccaggtcaggcaccccgtggtctaataggtgccactgacatgaggccctctggtactcctgccagattctcaggctccctgcttggaggcaaggctgccctcaccctctcaggggtacagccagaggatgaggcagaatattactgtgctctatggtacagcaaccgctgggtgttcggtggaggaaccaaactgactgtccta

SEQ ID NO: 97 - protein, 249 aa, Artificial Sequence
  VH-VL-P of A2J
EVQLLESGGGLVQPGGSLKLSCAASGFTFNVYAMNWVRQAPGKGLEWVARIRSKYNNYATYYADSVKKRFTISRDDSKNTAYLQMNNLKTEDTAVYYCVRHGNFGNSYLSWWAYWGQGTLVTVSSGGGGSGGGGSGGGGSELVVTQEPSLTVSPGGTVTLTCRSSTGAVTSGYYPNWVQQKPGQAPRGLIGATDMRPSGTPARFSGSLLGGKAALTLSGVQPEDEAEYYCALWYSNRWVFGGGTKLTVL

SEQ ID NO: 98 - DNA, 747 bp, Artificial Sequence
  VH-VL-P of A2J
gaggtgcagctgctcgagtctggaggaggattggtgcagcctggagggtcattgaaactctcatgtgcagcctctggattcaccttcaatgtctacgccatgaactgggtccgccaggctccaggaaagggtttggaatgggttgctcgcataagaagtaaatataataattatgcaacatattatgccgattcagtgaaaaagaggttcaccatctccagagatgattcaaaaaacactgcctatctacaaatgaacaacttgaaaactgaggacactgccgtgtactactgtgtgagacatgggaacttcggtaatagctacttatcctggtgggcttactggggccaagggactctggtcaccgtctcctcaggtggtggtggttctggcggcggcggctccggtggtggtggttctgagctcgttgtgactcaggaaccttcactcaccgtatcacctggtggaacagtcacactcacttgtcgctcctcgactggggctgttacatctggctactacccaaactgggtccaacaaaaaccaggtcaggcaccccgtggtctaataggtgccactgacatgaggccctctggtactcctgccagattctcaggctccctgcttggaggcaaggctgccctcaccctctcaggggtacagccagaggatgaggcagaatattactgtgctctatggtacagcaaccgctgggtgttcggtggaggaaccaaactgactgtccta

SEQ ID NO: 99 - protein, 14 aa, Artificial Sequence
  CDR-L1 of E1L
GSSTGAVTSGYYPN

SEQ ID NO: 100 - protein, 7 aa, Artificial Sequence
  CDR-L2 of E1L
GTKFLAP

SEQ ID NO: 101 - protein, 9 aa, Artificial Sequence
  CDR-L3 of E1L
ALWYSNRWV

SEQ ID NO: 102 - protein, 5 aa, Artificial Sequence
  CDR-H1 of E1L
KYAMN

SEQ ID NO: 103 - protein, 19 aa, Artificial Sequence
  CDR-H2 of E1L
RIRSKYNNYATYYADSVKS

SEQ ID NO: 104 - protein, 14 aa, Artificial Sequence
  CDR-H3 of E1L
HGNFGNSYTSYYAY

SEQ ID NO: 105 - protein, 125 aa, Artificial Sequence
  VH of E1L
EVQLVESGGGLVQPGGSLKLSCAASGFTFNKYAMNWVRQAPGKGLEWVARIRSKYNNYATYYADSVKSRFTISRDDSKNTAYLQMNNLKTEDTAVYYCVRHGNFGNSYTSYYAYWGQGTLVTVSS

SEQ ID NO: 106 - DNA, 375 bp, Artificial Sequence
  VH of E1L
gaggtgcagctggtcgagtctggaggaggattggtgcagcctggagggtcattgaaactctcatgtgcagcctctggattcaccttcaataagtacgccatgaactgggtccgccaggctccaggaaagggtttggaatgggttgctcgcataagaagtaaatataataattatgcaacatattatgccgattcagtgaaatcgaggttcaccatctccagagatgattcaaaaaacactgcctatctacaaatgaacaacttgaaaactgaggacactgccgtgtactactgtgtgagacatgggaacttcggtaatagctacacatcctactacgcttactggggccaagggactctggtcaccgtctcctca

SEQ ID NO: 107 - protein, 109 aa, Artificial Sequence; identical to SEQ ID NO: 17
  VL of E1L

SEQ ID NO: 108 - DNA, 327 bp, Artificial Sequence; identical to SEQ ID NO: 18
  VL of E1L

SEQ ID NO: 109 - protein, 125 aa, Artificial Sequence
  VH-P of E1L
EVQLLESGGGLVQPGGSLKLSCAASGFTFNKYAMNWVRQAPGKGLEWVARIRSKYNNYATYYADSVKSRFTISRDDSKNTAYLQMNNLKTEDTAVYYCVRHGNFGNSYTSYYAYWGQGTLVTVSS

SEQ ID NO: 110 - DNA, 375 bp, Artificial Sequence
  VH-P of E1L
gaggtgcagctgctcgagtctggaggaggattggtgcagcctggagggtcattgaaactctcatgtgcagcctctggattcaccttcaataagtacgccatgaactgggtccgccaggctccaggaaagggtttggaatgggttgctcgcataagaagtaaatataataattatgcaacatattatgccgattcagtgaaatcgaggttcaccatctccagagatgattcaaaaaacactgcctatctacaaatgaacaacttgaaaactgaggacactgccgtgtactactgtgtgagacatgggaacttcggtaatagctacacatcctactacgcttactggggccaagggactctggtcaccgtctcctca

SEQ ID NO: 111 - protein, 109 aa, Artificial Sequence; identical to SEQ ID NO: 21
  VL-P of E1L

SEQ ID NO: 112 - DNA, 327 bp, Artificial Sequence; identical to SEQ ID NO: 22
  VL-P of E1L

SEQ ID NO: 113 - protein, 249 aa, Artificial Sequence
  VH-VL of E1L
EVQLVESGGGLVQPGGSLKLSCAASGFTFNKYAMNWVRQAPGKGLEWVARIRSKYNNYATYYADSVKSRFTISRDDSKNTAYLQMNNLKTEDTAVYYCVRHGNFGNSYTSYYAYWGQGTLVTVSSGGGGSGGGGSGGGGSQTVVTQEPSLTVSPGGTVTLTCGSSTGAVTSGYYPNWVQQKPGQAPRGLIGGTKFLAPGTPARFSGSLLGGKAALTLSGVQPEDEAEYYCALWYSNRWVFGGGTKLTVL

SEQ ID NO: 114 - DNA, 747 bp, Artificial Sequence
  VH-VL of E1L
gaggtgcagctggtcgagtctggaggaggattggtgcagcctggagggtcattgaaactctcatgtgcagcctctggattcaccttcaataagtacgccatgaactgggtccgccaggctccaggaaagggtttggaatgggttgctcgcataagaagtaaatataataattatgcaacatattatgccgattcagtgaaatcgaggttcaccatctccagagatgattcaaaaaacactgcctatctacaaatgaacaacttgaaaactgaggacactgccgtgtactactgtgtgagacatgggaacttcggtaatagctacacatcctactacgcttactggggccaagggactctggtcaccgtctcctcaggtggtggtggttctggcggcggcggctccggtggtggtggttctcagactgttgtgactcaggaaccttcactcaccgtatcacctggtggaacagtcacactcacttgtggctcctcgactggggctgttacatctggctactacccaaactgggtccaacaaaaaccaggtcaggcaccccgtggtctaataggtgggactaagttcctcgcccccggtactcctgccagattctcaggctccctgcttggaggcaaggctgccctcaccctctcaggggtacagccagaggatgaggcagaatattactgtgctctatggtacagcaaccgctgggtgttcggtggaggaaccaaactgactgtccta

SEQ ID NO: 115 - protein, 249 aa, Artificial Sequence
  VH-VL-P of E1L
EVQLLESGGGLVQPGGSLKLSCAASGFTFNKYAMNWVRQAPGKGLEWVARIRSKYNNYATYYADSVKSRFTISRDDSKNTAYLQMNNLKTEDTAVYYCVRHGNFGNSYTSYYAYWGQGTLVTVSSGGGGSGGGGSGGGGSELVVTQEPSLTVSPGGTVTLTCGSSTGAVTSGYYPNWVQQKPGQAPRGLIGGTKFLAPGTPARFSGSLLGGKAALTLSGVQPEDEAEYYCALWYSNRWVFGGGTKLTVL

SEQ ID NO: 116 - DNA, 747 bp, Artificial Sequence
  VH-VL-P of E1L
gaggtgcagctgctcgagtctggaggaggattggtgcagcctggagggtcattgaaactctcatgtgcagcctctggattcaccttcaataagtacgccatgaactgggtccgccaggctccaggaaagggtttggaatgggttgctcgcataagaagtaaatataataattatgcaacatattatgccgattcagtgaaatcgaggttcaccatctccagagatgattcaaaaaacactgcctatctacaaatgaacaacttgaaaactgaggacactgccgtgtactactgtgtgagacatgggaacttcggtaatagctacacatcctactacgcttactggggccaagggactctggtcaccgtctcctcaggtggtggtggttctggcggcggcggctccggtggtggtggttctgagctcgttgtgactcaggaaccttcactcaccgtatcacctggtggaacagtcacactcacttgtggctcctcgactggggctgttacatctggctactacccaaactgggtccaacaaaaaccaggtcaggcaccccgtggtctaataggtgggactaagttcctcgcccccggtactcctgccagattctcaggctccctgcttggaggcaaggctgccctcaccctctcaggggtacagccagaggatgaggcagaatattactgtgctctatggtacagcaaccgctgggtgttcggtggaggaaccaaactgactgtccta

SEQ ID NO: 117 - protein, 14 aa, Artificial Sequence
  CDR-L1 of E2M
RSSTGAVTSGYYPN

SEQ ID NO: 118 - protein, 7 aa, Artificial Sequence
  CDR-L2 of E2M
ATDMRPS

SEQ ID NO: 119 - protein, 9 aa, Artificial Sequence
  CDR-L3 of E2M
ALWYSNRWV

SEQ ID NO: 120 - protein, 5 aa, Artificial Sequence
  CDR-H1 of E2M
GYAMN

SEQ ID NO: 121 - protein, 19 aa, Artificial Sequence
  CDR-H2 of E2M
RIRSKYNNYATYYADSVKE

SEQ ID NO: 122 - protein, 14 aa, Artificial Sequence
  CDR-H3 of E2M
HRNFGNSYLSWFAY

SEQ ID NO: 123 - protein, 125 aa, Artificial Sequence
  VH of E2M
EVQLVESGGGLVQPGGSLKLSCAASGFTFNGYAMNWVRQAPGKGLEWVARIRSKYNNYATYYADSVKERFTISRDDSKNTAYLQMNNLKTEDTAVYYCVRHRNFGNSYLSWFAYWGQGTLVTVSS

SEQ ID NO: 124 - DNA, 375 bp, Artificial Sequence
  VH of E2M
gaggtgcagctggtcgagtctggaggaggattggtgcagcctggagggtcattgaaactctcatgtgcagcctctggattcaccttcaatggctacgccatgaactgggtccgccaggctccaggaaagggtttggaatgggttgctcgcataagaagtaaatataataattatgcaacatattatgccgattcagtgaaagagaggttcaccatctccagagatgattcaaaaaacactgcctatctacaaatgaacaacttgaaaactgaggacactgccgtgtactactgtgtgagacataggaacttcggtaatagctacttatcctggttcgcttactggggccaagggactctggtcaccgtctcctca

SEQ ID NO: 125 - protein, 109 aa, Artificial Sequence; identical to SEQ ID NO: 89
  VL of E2M

SEQ ID NO: 126 - DNA, 327 bp, Artificial Sequence; identical to SEQ ID NO: 90
  VL of E2M

SEQ ID NO: 127 - protein, 125 aa, Artificial Sequence
  VH-P of E2M
EVQLLESGGGLVQPGGSLKLSCAASGFTFNGYAMNWVRQAPGKGLEWVARIRSKYNNYATYYADSVKERFTISRDDSKNTAYLQMNNLKTEDTAVYYCVRHRNFGNSYLSWFAYWGQGTLVTVSS

SEQ ID NO: 128 - DNA, 375 bp, Artificial Sequence
  VH-P of E2M
gaggtgcagctgctcgagtctggaggaggattggtgcagcctggagggtcattgaaactctcatgtgcagcctctggattcaccttcaatggctacgccatgaactgggtccgccaggctccaggaaagggtttggaatgggttgctcgcataagaagtaaatataataattatgcaacatattatgccgattcagtgaaagagaggttcaccatctccagagatgattcaaaaaacactgcctatctacaaatgaacaacttgaaaactgaggacactgccgtgtactactgtgtgagacataggaacttcggtaatagctacttatcctggttcgcttactggggccaagggactctggtcaccgtctcctca

SEQ ID NO: 129 - protein, 109 aa, Artificial Sequence; identical to SEQ ID NO: 93
  VL-P of E2M

SEQ ID NO: 130 - DNA, 327 bp, Artificial Sequence; identical to SEQ ID NO: 94
  VL-P of E2M

SEQ ID NO: 131 - protein, 249 aa, Artificial Sequence
  VH-VL of E2M
EVQLVESGGGLVQPGGSLKLSCAASGFTFNGYAMNWVRQAPGKGLEWVARIRSKYNNYATYYADSVKERFTISRDDSKNTAYLQMNNLKTEDTAVYYCVRHRNFGNSYLSWFAYWGQGTLVTVSSGGGGSGGGGSGGGGSQTVVTQEPSLTVSPGGTVTLTCRSSTGAVTSGYYPNWVQQKPGQAPRGLIGATDMRPSGTPARFSGSLLGGKAALTLSGVQPEDEAEYYCALWYSNRWVFGGGTKLTVL

SEQ ID NO: 132 - DNA, 747 bp, Artificial Sequence
  VH-VL of E2M
gaggtgcagctggtcgagtctggaggaggattggtgcagcctggagggtcattgaaactctcatgtgcagcctctggattcaccttcaatggctacgccatgaactgggtccgccaggctccaggaaagggtttggaatgggttgctcgcataagaagtaaatataataattatgcaacatattatgccgattcagtgaaagagaggttcaccatctccagagatgattcaaaaaacactgcctatctacaaatgaacaacttgaaaactgaggacactgccgtgtactactgtgtgagacataggaacttcggtaatagctacttatcctggttcgcttactggggccaagggactctggtcaccgtctcctcaggtggtggtggttctggcggcggcggctccggtggtggtggttctcagactgttgtgactcaggaaccttcactcaccgtatcacctggtggaacagtcacactcacttgtcgctcctcgactggggctgttacatctggctactacccaaactgggtccaacaaaaaccaggtcaggcaccccgtggtctaataggtgccactgacatgaggccctctggtactcctgccagattctcaggctccctgcttggaggcaaggctgccctcaccctctcaggggtacagccagaggatgaggcagaatattactgtgctctatggtacagcaaccgctgggtgttcggtggaggaaccaaactgactgtccta

SEQ ID NO: 133 - protein, 249 aa, Artificial Sequence
  VH-VL-P of E2M
EVQLLESGGGLVQPGGSLKLSCAASGFTFNGYAMNWVRQAPGKGLEWVARIRSKYNNYATYYADSVKERFTISRDDSKNTAYLQMNNLKTEDTAVYYCVRHRNFGNSYLSWFAYWGQGTLVTVSSGGGGSGGGGSGGGGSELVVTQEPSLTVSPGGTVTLTCRSSTGAVTSGYYPNWVQQKPGQAPRGLIGATDMRPSGTPARFSGSLLGGKAALTLSGVQPEDEAEYYCALWYSNRWVFGGGTKLTVL

SEQ ID NO: 134 - DNA, 747 bp, Artificial Sequence
  VH-VL-P of E2M
gaggtgcagctgctcgagtctggaggaggattggtgcagcctggagggtcattgaaactctcatgtgcagcctctggattcaccttcaatggctacgccatgaactgggtccgccaggctccaggaaagggtttggaatgggttgctcgcataagaagtaaatataataattatgcaacatattatgccgattcagtgaaagagaggttcaccatctccagagatgattcaaaaaacactgcctatctacaaatgaacaacttgaaaactgaggacactgccgtgtactactgtgtgagacataggaacttcggtaatagctacttatcctggttcgcttactggggccaagggactctggtcaccgtctcctcaggtggtggtggttctggcggcggcggctccggtggtggtggttctgagctcgttgtgactcaggaaccttcactcaccgtatcacctggtggaacagtcacactcacttgtcgctcctcgactggggctgttacatctggctactacccaaactgggtccaacaaaaaccaggtcaggcaccccgtggtctaataggtgccactgacatgaggccctctggtactcctgccagattctcaggctccctgcttggaggcaaggctgccctcaccctctcaggggtacagccagaggatgaggcagaatattactgtgctctatggtacagcaaccgctgggtgttcggtggaggaaccaaactgactgtccta

SEQ ID NO: 135 - protein, 14 aa, Artificial Sequence
  CDR-L1 of F7O
GSSTGAVTSGYYPN

SEQ ID NO: 136 - protein, 7 aa, Artificial Sequence
  CDR-L2 of F7O
GTKFLAP

SEQ ID NO: 137 - protein, 9 aa, Artificial Sequence
  CDR-L3 of F7O
ALWYSNRWV

SEQ ID NO: 138 - protein, 5 aa, Artificial Sequence
  CDR-H1 of F7O
VYAMN

SEQ ID NO: 139 - protein, 19 aa, Artificial Sequence
  CDR-H2 of F7O
RIRSKYNNYATYYADSVKK

SEQ ID NO: 140 - protein, 14 aa, Artificial Sequence
  CDR-H3 of F7O
HGNFGNSYISWWAY

SEQ ID NO: 141 - protein, 125 aa, Artificial Sequence
  VH of F7O
EVQLVESGGGLVQPGGSLKLSCAASGFTFNVYAMNWVRQAPGKGLEWVARIRSKYNNYATYYADSVKKRFTISRDDSKNTAYLQMNNLKTEDTAVYYCVRHGNFGNSYISWWAYWGQGTLVTVSS

SEQ ID NO: 142 - DNA, 375 bp, Artificial Sequence
  VH of F7O
gaggtgcagctggtcgagtctggaggaggattggtgcagcctggagggtcattgaaactctcatgtgcagcctctggattcaccttcaatgtgtacgccatgaactgggtccgccaggctccaggaaagggtttggaatgggttgctcgcataagaagtaaatataataattatgcaacatattatgccgattcagtgaaaaagaggttcaccatctccagagatgattcaaaaaacactgcctatctacaaatgaacaacttgaaaactgaggacactgccgtgtactactgtgtgagacatgggaacttcggtaatagctacatatcctggtgggcttactggggccaagggactctggtcaccgtctcctca

SEQ ID NO: 143 - protein, 109 aa, Artificial Sequence; identical to SEQ ID NO: 17
  VL of F7O

SEQ ID NO: 144 - DNA, 327 bp, Artificial Sequence; identical to SEQ ID NO: 18
  VL of F7O

SEQ ID NO: 145 - protein, 125 aa, Artificial Sequence
  VH-P of F7O
EVQLLESGGGLVQPGGSLKLSCAASGFTFNVYAMNWVRQAPGKGLEWVARIRSKYNNYATYYADSVKKRFTISRDDSKNTAYLQMNNLKTEDTAVYYCVRHGNFGNSYISWWAYWGQGTLVTVSS

SEQ ID NO: 146 - DNA, 375 bp, Artificial Sequence
  VH-P of F7O
gaggtgcagctgctcgagtctggaggaggattggtgcagcctggagggtcattgaaactctcatgtgcagcctctggattcaccttcaatgtgtacgccatgaactgggtccgccaggctccaggaaagggtttggaatgggttgctcgcataagaagtaaatataataattatgcaacatattatgccgattcagtgaaaaagaggttcaccatctccagagatgattcaaaaaacactgcctatctacaaatgaacaacttgaaaactgaggacactgccgtgtactactgtgtgagacatgggaacttcggtaatagctacatatcctggtgggcttactggggccaagggactctggtcaccgtctcctca

SEQ ID NO: 147 - protein, 109 aa, Artificial Sequence; identical to SEQ ID NO: 21
  VL-P of F7O

SEQ ID NO: 148 - DNA, 327 bp, Artificial Sequence; identical to SEQ ID NO: 22
  VL-P of F7O

SEQ ID NO: 149 - protein, 249 aa, Artificial Sequence
  VH-VL of F7O
EVQLVESGGGLVQPGGSLKLSCAASGFTFNVYAMNWVRQAPGKGLEWVARIRSKYNNYATYYADSVKKRFTISRDDSKNTAYLQMNNLKTEDTAVYYCVRHGNFGNSYISWWAYWGQGTLVTVSSGGGGSGGGGSGGGGSQTVVTQEPSLTVSPGGTVTLTCGSSTGAVTSGYYPNWVQQKPGQAPRGLIGGTKFLAPGTPARFSGSLLGGKAALTLSGVQPEDEAEYYCALWYSNRWVFGGGTKLTVL

SEQ ID NO: 150 - DNA, 747 bp, Artificial Sequence
  VH-VL of F7O
gaggtgcagctggtcgagtctggaggaggattggtgcagcctggagggtcattgaaactctcatgtgcagcctctggattcaccttcaatgtgtacgccatgaactgggtccgccaggctccaggaaagggtttggaatgggttgctcgcataagaagtaaatataataattatgcaacatattatgccgattcagtgaaaaagaggttcaccatctccagagatgattcaaaaaacactgcctatctacaaatgaacaacttgaaaactgaggacactgccgtgtactactgtgtgagacatgggaacttcggtaatagctacatatcctggtgggcttactggggccaagggactctggtcaccgtctcctcaggtggtggtggttctggcggcggcggctccggtggtggtggttctcagactgttgtgactcaggaaccttcactcaccgtatcacctggtggaacagtcacactcacttgtggctcctcgactggggctgttacatctggctactacccaaactgggtccaacaaaaaccaggtcaggcaccccgtggtctaataggtgggactaagttcctcgcccccggtactcctgccagattctcaggctccctgcttggaggcaaggctgccctcaccctctcaggggtacagccagaggatgaggcagaatattactgtgctctatggtacagcaaccgctgggtgttcggtggaggaaccaaactgactgtccta

SEQ ID NO: 151 - protein, 249 aa, Artificial Sequence
  VH-VL-P of F7O
EVQLLESGGGLVQPGGSLKLSCAASGFTFNVYAMNWVRQAPGKGLEWVARIRSKYNNYATYYADSVKKRFTISRDDSKNTAYLQMNNLKTEDTAVYYCVRHGNFGNSYISWWAYWGQGTLVTVSSGGGGSGGGGSGGGGSELVVTQEPSLTVSPGGTVTLTCGSSTGAVTSGYYPNWVQQKPGQAPRGLIGGTKFLAPGTPARFSGSLLGGKAALTLSGVQPEDEAEYYCALWYSNRWVFGGGTKLTVL

SEQ ID NO: 152 - DNA, 747 bp, Artificial Sequence
  VH-VL-P of F7O
gaggtgcagctgctcgagtctggaggaggattggtgcagcctggagggtcattgaaactctcatgtgcagcctctggattcaccttcaatgtgtacgccatgaactgggtccgccaggctccaggaaagggtttggaatgggttgctcgcataagaagtaaatataataattatgcaacatattatgccgattcagtgaaaaagaggttcaccatctccagagatgattcaaaaaacactgcctatctacaaatgaacaacttgaaaactgaggacactgccgtgtactactgtgtgagacatgggaacttcggtaatagctacatatcctggtgggcttactggggccaagggactctggtcaccgtctcctcaggtggtggtggttctggcggcggcggctccggtggtggtggttctgagctcgttgtgactcaggaaccttcactcaccgtatcacctggtggaacagtcacactcacttgtggctcctcgactggggctgttacatctggctactacccaaactgggtccaacaaaaaccaggtcaggcaccccgtggtctaataggtgggactaagttcctcgcccccggtactcctgccagattctcaggctccctgcttggaggcaaggctgccctcaccctctcaggggtacagccagaggatgaggcagaatattactgtgctctatggtacagcaaccgctgggtgttcggtggaggaaccaaactgactgtccta

SEQ ID NO: 153 - protein, 14 aa, Artificial Sequence
  CDR-L1 of F12Q
GSSTGAVTSGNYPN

SEQ ID NO: 154 - protein, 7 aa, Artificial Sequence
  CDR-L2 of F12Q
GTKFLAP

SEQ ID NO: 155 - protein, 9 aa, Artificial Sequence
  CDR-L3 of F12Q
VLWYSNRWV

SEQ ID NO: 156 - protein, 5 aa, Artificial Sequence
  CDR-H1 of F12Q
SYAMN

SEQ ID NO: 157 - protein, 19 aa, Artificial Sequence
  CDR-H2 of F12Q
RIRSKYNNYATYYADSVKG

SEQ ID NO: 158 - protein, 14 aa, Artificial Sequence
  CDR-H3 of F12Q
HGNFGNSYVSWWAY

SEQ ID NO: 159 - protein, 125 aa, Artificial Sequence
  VH of F12Q
EVQLVESGGGLVQPGGSLKLSCAASGFTFNSYAMNWVRQAPGKGLEWVARIRSKYNNYATYYADSVKGRFTISRDDSKNTAYLQMNNLKTEDTAVYYCVRHGNFGNSYVSWWAYWGQGTLVTVSS

SEQ ID NO: 160 - DNA, 375 bp, Artificial Sequence
  VH of F12Q
gaggtgcagctggtcgagtctggaggaggattggtgcagcctggagggtcattgaaactctcatgtgcagcctctggattcaccttcaatagctacgccatgaactgggtccgccaggctccaggaaagggtttggaatgggttgctcgcataagaagtaaatataataattatgcaacatattatgccgattcagtgaaaggcaggttcaccatctccagagatgattcaaaaaacactgcctatctacaaatgaacaacttgaaaactgaggacactgccgtgtactactgtgtgagacatgggaacttcggtaatagctacgtttcctggtgggcttactggggccaagggactctggtcaccgtctcctca

SEQ ID NO: 161 - protein, 109 aa, Artificial Sequence
  VL of F12Q
QTVVTQEPSLTVSPGGTVTLTCGSSTGAVTSGNYPNWVQQKPGQAPRGLIGGTKFLAPGTPARFSGSLLGGKAALTLSGVQPEDEAEYYCVLWYSNRWVFGGGTKLTVL

SEQ ID NO: 162 - DNA, 327 bp, Artificial Sequence
  VL of F12Q
cagactgttgtgactcaggaaccttcactcaccgtatcacctggtggaacagtcacactcacttgtggctcctcgactggggctgttacatctggcaactacccaaactgggtccaacaaaaaccaggtcaggcaccccgtggtctaataggtgggactaagttcctcgcccccggtactcctgccagattctcaggctccctgcttggaggcaaggctgccctcaccctctcaggggtacagccagaggatgaggcagaatattactgtgttctatggtacagcaaccgctgggtgttcggtggaggaaccaaactgactgtccta

SEQ ID NO: 163 - protein, 125 aa, Artificial Sequence
  VH-P of F12Q
EVQLLESGGGLVQPGGSLKLSCAASGFTFNSYAMNWVRQAPGKGLEWVARIRSKYNNYATYYADSVKGRFTISRDDSKNTAYLQMNNLKTEDTAVYYCVRHGNFGNSYVSWWAYWGQGTLVTVSS

SEQ ID NO: 164 - DNA, 375 bp, Artificial Sequence
  VH-P of F12Q
gaggtgcagctgctcgagtctggaggaggattggtgcagcctggagggtcattgaaactctcatgtgcagcctctggattcaccttcaatagctacgccatgaactgggtccgccaggctccaggaaagggtttggaatgggttgctcgcataagaagtaaatataataattatgcaacatattatgccgattcagtgaaaggcaggttcaccatctccagagatgattcaaaaaacactgcctatctacaaatgaacaacttgaaaactgaggacactgccgtgtactactgtgtgagacatgggaacttcggtaatagctacgtttcctggtgggcttactggggccaagggactctggtcaccgtctcctca

SEQ ID NO: 165 - protein, 109 aa, Artificial Sequence
  VL-P of F12Q
ELVVTQEPSLTVSPGGTVTLTCGSSTGAVTSGNYPNWVQQKPGQAPRGLIGGTKFLAPGTPARFSGSLLGGKAALTLSGVQPEDEAEYYCVLWYSNRWVFGGGTKLTVL

SEQ ID NO: 166 - DNA, 327 bp, Artificial Sequence
  VL-P of F12Q
gagctcgttgtgactcaggaaccttcactcaccgtatcacctggtggaacagtcacactcacttgtggctcctcgactggggctgttacatctggcaactacccaaactgggtccaacaaaaaccaggtcaggcaccccgtggtctaataggtgggactaagttcctcgcccccggtactcctgccagattctcaggctccctgcttggaggcaaggctgccctcaccctctcaggggtacagccagaggatgaggcagaatattactgtgttctatggtacagcaaccgctgggtgttcggtggaggaaccaaactgactgtccta

SEQ ID NO: 167 - protein, 249 aa, Artificial Sequence
  VH-VL of F12Q
EVQLVESGGGLVQPGGSLKLSCAASGFTFNSYAMNWVRQAPGKGLEWVARIRSKYNNYATYYADSVKGRFTISRDDSKNTAYLQMNNLKTEDTAVYYCVRHGNFGNSYVSWWAYWGQGTLVTVSSGGGGSGGGGSGGGGSQTVVTQEPSLTVSPGGTVTLTCGSSTGAVTSGNYPNWVQQKPGQAPRGLIGGTKFLAPGTPARFSGSLLGGKAALTLSGVQPEDEAEYYCVLWYSNRWVFGGGTKLTVL

SEQ ID NO: 168 - DNA, 747 bp, Artificial Sequence
  VH-VL of F12Q
gaggtgcagctggtcgagtctggaggaggattggtgcagcctggagggtcattgaaactctcatgtgcagcctctggattcaccttcaatagctacgccatgaactgggtccgccaggctccaggaaagggtttggaatgggttgctcgcataagaagtaaatataataattatgcaacatattatgccgattcagtgaaaggcaggttcaccatctccagagatgattcaaaaaacactgcctatctacaaatgaacaacttgaaaactgaggacactgccgtgtactactgtgtgagacatgggaacttcggtaatagctacgtttcctggtgggcttactggggccaagggactctggtcaccgtctcctcaggtggtggtggttctggcggcggcggctccggtggtggtggttctcagactgttgtgactcaggaaccttcactcaccgtatcacctggtggaacagtcacactcacttgtggctcctcgactggggctgttacatctggcaactacccaaactgggtccaacaaaaaccaggtcaggcaccccgtggtctaataggtgggactaagttcctcgcccccggtactcctgccagattctcaggctccctgcttggaggcaaggctgccctcaccctctcaggggtacagccagaggatgaggcagaatattactgtgttctatggtacagcaaccgctgggtgttcggtggaggaaccaaactgactgtccta

SEQ ID NO: 169 - protein, 249 aa, Artificial Sequence
  VH-VL-P of F12Q
EVQLLESGGGLVQPGGSLKLSCAASGFTFNSYAMNWVRQAPGKGLEWVARIRSKYNNYATYYADSVKGRFTISRDDSKNTAYLQMNNLKTEDTAVYYCVRHGNFGNSYVSWWAYWGQGTLVTVSSGGGGSGGGGSGGGGSELVVTQEPSLTVSPGGTVTLTCGSSTGAVTSGNYPNWVQQKPGQAPRGLIGGTKFLAPGTPARFSGSLLGGKAALTLSGVQPEDEAEYYCVLWYSNRWVFGGGTKLTVL

SEQ ID NO: 170 - DNA, 747 bp, Artificial Sequence
  VH-VL-P of F12Q
gaggtgcagctgctcgagtctggaggaggattggtgcagcctggagggtcattgaaactctcatgtgcagcctctggattcaccttcaatagctacgccatgaactgggtccgccaggctccaggaaagggtttggaatgggttgctcgcataagaagtaaatataataattatgcaacatattatgccgattcagtgaaaggcaggttcaccatctccagagatgattcaaaaaacactgcctatctacaaatgaacaacttgaaaactgaggacactgccgtgtactactgtgtgagacatgggaacttcggtaatagctacgtttcctggtgggcttactggggccaagggactctggtcaccgtctcctcaggtggtggtggttctggcggcggcggctccggtggtggtggttctgagctcgttgtgactcaggaaccttcactcaccgtatcacctggtggaacagtcacactcacttgtggctcctcgactggggctgttacatctggcaactacccaaactgggtccaacaaaaaccaggtcaggcaccccgtggtctaataggtgggactaagttcctcgcccccggtactcctgccagattctcaggctccctgcttggaggcaaggctgccctcaccctctcaggggtacagccagaggatgaggcagaatattactgtgttctatggtacagcaaccgctgggtgttcggtggaggaaccaaactgactgtccta

SEQ ID NO: 171 - protein, 14 aa, Artificial Sequence
  CDR-L1 of I2C
GSSTGAVTSGNYPN

SEQ ID NO: 172 - protein, 7 aa, Artificial Sequence
  CDR-L2 of I2C
GTKFLAP

SEQ ID NO: 173 - protein, 9 aa, Artificial Sequence
  CDR-L3 of I2C
VLWYSNRWV

SEQ ID NO: 174 - protein, 5 aa, Artificial Sequence
  CDR-H1 of I2C
KYAMN

SEQ ID NO: 175 - protein, 19 aa, Artificial Sequence
  CDR-H2 of I2C
RIRSKYNNYATYYADSVKD

SEQ ID NO: 176 - protein, 14 aa, Artificial Sequence
  CDR-H3 of I2C
HGNFGNSYISYWAY

SEQ ID NO: 177 - protein, 125 aa, Artificial Sequence; identical to SEQ ID NO: 33
  VH of I2C

SEQ ID NO: 178 - DNA, 375 bp, Artificial Sequence; identical to SEQ ID NO: 34
  VH of I2C

SEQ ID NO: 179 - protein, 109 aa, Artificial Sequence; identical to SEQ ID NO: 161
  VL of I2C

SEQ ID NO: 180 - DNA, 327 bp, Artificial Sequence; identical to SEQ ID NO: 162
  VL of I2C

SEQ ID NO: 181 - protein, 125 aa, Artificial Sequence; identical to SEQ ID NO: 37
  VH-P of I2C

SEQ ID NO: 182 - DNA, 375 bp, Artificial Sequence; identical to SEQ ID NO: 38
  VH-P of I2C

SEQ ID NO: 183 - protein, 109 aa, Artificial Sequence; identical to SEQ ID NO: 165
  VL-P of I2C

SEQ ID NO: 184 - DNA, 327 bp, Artificial Sequence; identical to SEQ ID NO: 166
  VL-P of I2C

SEQ ID NO: 185 - protein, 249 aa, Artificial Sequence
  VH-VL of I2C
EVQLVESGGGLVQPGGSLKLSCAASGFTFNKYAMNWVRQAPGKGLEWVARIRSKYNNYATYYADSVKDRFTISRDDSKNTAYLQMNNLKTEDTAVYYCVRHGNFGNSYISYWAYWGQGTLVTVSSGGGGSGGGGSGGGGSQTVVTQEPSLTVSPGGTVTLTCGSSTGAVTSGNYPNWVQQKPGQAPRGLIGGTKFLAPGTPARFSGSLLGGKAALTLSGVQPEDEAEYYCVLWYSNRWVFGGGTKLTVL

SEQ ID NO: 186 - DNA, 747 bp, Artificial Sequence
  VH-VL of I2C
gaggtgcagctggtcgagtctggaggaggattggtgcagcctggagggtcattgaaactctcatgtgcagcctctggattcaccttcaataagtacgccatgaactgggtccgccaggctccaggaaagggtttggaatgggttgctcgcataagaagtaaatataataattatgcaacatattatgccgattcagtgaaagacaggttcaccatctccagagatgattcaaaaaacactgcctatctacaaatgaacaacttgaaaactgaggacactgccgtgtactactgtgtgagacatgggaacttcggtaatagctacatatcctactgggcttactggggccaagggactctggtcaccgtctcctcaggtggtggtggttctggcggcggcggctccggtggtggtggttctcagactgttgtgactcaggaaccttcactcaccgtatcacctggtggaacagtcacactcacttgtggctcctcgactggggctgttacatctggcaactacccaaactgggtccaacaaaaaccaggtcaggcaccccgtggtctaataggtgggactaagttcctcgcccccggtactcctgccagattctcaggctccctgcttggaggcaaggctgccctcaccctctcaggggtacagccagaggatgaggcagaatattactgtgttctatggtacagcaaccgctgggtgttcggtggaggaaccaaactgactgtccta

SEQ ID NO: 187 - protein, 249 aa, Artificial Sequence
  VH-VL-P of I2C
EVQLLESGGGLVQPGGSLKLSCAASGFTFNKYAMNWVRQAPGKGLEWVARIRSKYNNYATYYADSVKDRFTISRDDSKNTAYLQMNNLKTEDTAVYYCVRHGNFGNSYISYWAYWGQGTLVTVSSGGGGSGGGGSGGGGSELVVTQEPSLTVSPGGTVTLTCGSSTGAVTSGNYPNWVQQKPGQAPRGLIGGTKFLAPGTPARFSGSLLGGKAALTLSGVQPEDEAEYYCVLWYSNRWVFGGGTKLTVL

SEQ ID NO: 188 - DNA, 747 bp, Artificial Sequence
  VH-VL-P of I2C
gaggtgcagctgctcgagtctggaggaggattggtgcagcctggagggtcattgaaactctcatgtgcagcctctggattcaccttcaataagtacgccatgaactgggtccgccaggctccaggaaagggtttggaatgggttgctcgcataagaagtaaatataataattatgcaacatattatgccgattcagtgaaagacaggttcaccatctccagagatgattcaaaaaacactgcctatctacaaatgaacaacttgaaaactgaggacactgccgtgtactactgtgtgagacatgggaacttcggtaatagctacatatcctactgggcttactggggccaagggactctggtcaccgtctcctcaggtggtggtggttctggcggcggcggctccggtggtggtggttctgagctcgttgtgactcaggaaccttcactcaccgtatcacctggtggaacagtcacactcacttgtggctcctcgactggggctgttacatctggcaactacccaaactgggtccaacaaaaaccaggtcaggcaccccgtggtctaataggtgggactaagttcctcgcccccggtactcctgccagattctcaggctccctgcttggaggcaaggctgccctcaccctctcaggggtacagccagaggatgaggcagaatattactgtgttctatggtacagcaaccgctgggtgttcggtggaggaaccaaactgactgtccta

SEQ ID NO: 189 - protein, 15 aa, Artificial Sequence
  CDR-L1 of EGF-R 21-63
RASQSVSSSTYSYIH

SEQ ID NO: 190 - protein, 7 aa, Artificial Sequence
  CDR-L2 of EGF-R 21-63
YASNLES

SEQ ID NO: 191 - protein, 9 aa, Artificial Sequence
  CDR-L3 of EGF-R 21-63
QHSWEIPFT

SEQ ID NO: 192 - protein, 5 aa, Artificial Sequence
  CDR-H1 of EGF-R 21-63
DCVII

SEQ ID NO: 193 - protein, 17 aa, Artificial Sequence
  CDR-H2 of EGF-R 21-63
QIYPGTGRSYYNEIFKG

SEQ ID NO: 194 - protein, 11 aa, Artificial Sequence
  CDR-H3 of EGF-R 21-63
STLIHGTWFSY

SEQ ID NO: 195 - protein, 120 aa, Artificial Sequence
  VH of EGF-R 21-63
QVQLQQSGPDLVKPGASVKMSCKASGHTFTDCVIIWVKQRAGQGLEWIGQIYPGTGRSYYNEIFKGKATLTADKSSNTVHIQLSSLTSEDSAVYFCALSTLIHGTWFSYWGQGTLVTVSS

SEQ ID NO: 196 - DNA, 360 bp, Artificial Sequence
  VH of EGF-R 21-63
caggttcagctgcagcagtctggacctgatctggtgaagcctggggcctcagtgaagatgtcctgcaaggcttctggacacactttcactgactgtgttataatctgggtgaaacagagagctggacagggccttgagtggattggacagatttatccagggactggtcgttcttactacaatgagattttcaagggcaaggccacactgactgcagacaaatcctccaacacagtccacattcaactcagcagcctgacatctgaggactctgcggtctatttctgtgccctatctactcttattcacgggacctggttttcttattggggccaagggactctggtcactgtctcttcc

SEQ ID NO: 197 - protein, 111 aa, Artificial Sequence
  VL of EGF-R 21-63
DIVLTQSPASLPVSLGQRATISCRASQSVSSSTYSYIHWYQQKPGQPPKLLITYASNLESGVPARFSGSGSGTDFTLDIHPVEEDDSSTYYCQHSWEIPFTFGSGTKLEIK

SEQ ID NO: 198 - DNA, 333 bp, Artificial Sequence
  VL of EGF-R 21-63
gacattgtgctgacacagtctcctgcttccttacctgtgtctctggggcagagggccaccatctcatgcagggccagccaaagtgtcagttcatctacttatagttatatacactggtaccaacagaaaccaggacagccacccaaactcctcatcacgtatgcatccaacctagaatctggggtccctgccaggttcagtggcagtgggtctgggacagacttcaccctcgacatccatcctgtggaggaggatgattcttcaacatattactgtcagcacagttgggagattccatttacgttcggctcggggacaaagttggaaataaaa

SEQ ID NO: 199 - protein, 246 aa, Artificial Sequence
  VL-VH of EGF-R 21-63
DIVLTQSPASLPVSLGQRATISCRASQSVSSSTYSYIHWYQQKPGQPPKLLITYASNLESGVPARFSGSGSGTDFTLDIHPVEEDDSSTYYCQHSWEIPFTFGSGTKLEIKGGGGSGGGGSGGGGSQVQLQQSGPDLVKPGASVKMSCKASGHTFTDCVIIWVKQRAGQGLEWIGQIYPGTGRSYYNEIFKGKATLTADKSSNTVHIQLSSLTSEDSAVYFCALSTLIHGTWFSYWGQGTLVTVSS

SEQ ID NO: 200 - DNA, 738 bp, Artificial Sequence
  VL-VH of EGF-R 21-63
gacattgtgctgacacagtctcctgcttccttacctgtgtctctggggcagagggccaccatctcatgcagggccagccaaagtgtcagttcatctacttatagttatatacactggtaccaacagaaaccaggacagccacccaaactcctcatcacgtatgcatccaacctagaatctggggtccctgccaggttcagtggcagtgggtctgggacagacttcaccctcgacatccatcctgtggaggaggatgattcttcaacatattactgtcagcacagttgggagattccatttacgttcggctcggggacaaagttggaaataaaaggtggtggtggttctggcggcggcggctccggtggtggtggttctcaggttcagctgcagcagtctggacctgatctggtgaagcctggggcctcagtgaagatgtcctgcaaggcttctggacacactttcactgactgtgttataatctgggtgaaacagagagctggacagggccttgagtggattggacagatttatccagggactggtcgttcttactacaatgagattttcaagggcaaggccacactgactgcagacaaatcctccaacacagtccacattcaactcagcagcctgacatctgaggactctgcggtctatttctgtgccctatctactcttattcacgggacctggttttcttattggggccaagggactctggtcactgtctcttcc

SEQ ID NO: 201 - protein, 17 aa, Artificial Sequence
  CDR-L1 of MCSP-G4
KSSQSVLNSSNNRNYLA

SEQ ID NO: 202 - protein, 7 aa, Artificial Sequence
  CDR-L2 of MCSP-G4
WASTRES

SEQ ID NO: 203 - protein, 9 aa, Artificial Sequence
  CDR-L3 of MCSP-G4
QQHYSTPFT

SEQ ID NO: 204 - protein, 5 aa, Artificial Sequence
  CDR-H1 of MCSP-G4
NYYIH

SEQ ID NO: 205 - protein, 17 aa, Artificial Sequence
  CDR-H2 of MCSP-G4
WINPNSGATNYAQKFQG

SEQ ID NO: 206 - protein, 8 aa, Artificial Sequence
  CDR-H3 of MCSP-G4
SWVSWFAS

SEQ ID NO: 207 - protein, 117 aa, Artificial Sequence
  VH of MCSP-G4
QVQLVQSGAEVKRPGASMKVSCKASGYTFTNYYIHWVRQAPGQGLEWMGWINPNSGATNYAQKFQGRVTMTRDTSTSTVYMELSSLRSEDTAVYYCAKSWVSWFASWGQGTLVTVSS

SEQ ID NO: 208 - DNA, 351 bp, Artificial Sequence
  VH of MCSP-G4
caggtgcagctggtccagtctggggctgaggtgaagaggcctggggcctcaatgaaggtctcctgcaaggcttctgggtacaccttcaccaactactatatacactgggtgcgacaggcccctggacaaggtcttgagtggatgggttggatcaaccctaacagtggtgccacaaactatgcacagaagttccagggcagagtcaccatgaccagggacacgtccacgagcacagtctacatggagctgagcagcctgagatctgaggacacggccgtgtattactgtgcgaaatcctgggtctcctggtttgcttcctggggtcaaggaaccttggtcaccgtctcctca

SEQ ID NO: 209 - protein, 113 aa, Artificial Sequence
  VL of MCSP-G4
DIVMTQSPDSLAVSLGERATINCKSSQSVLNSSNNRNYLAWYQQKPGQPPKLLIYWASTRESGVPDRFSGSGSGTDFTLTISGLQAEDVAVYYCQQHYSTPFTFGPGTKVDIK

SEQ ID NO: 210 - DNA, 339 bp, Artificial Sequence
  VL of MCSP-G4
gatatcgtgatgacccagtctccagactccctggctgtgtctctgggcgagagggccaccatcaactgcaagtccagccagagtgttttaaacagctccaacaataggaactacttagcttggtaccagcagaaaccaggacagcctcctaagctgctcatttactgggcatctacccgggaatccggggtccctgaccgattcagtggcagcgggtctgggacagatttcactctcaccatcagtggcctgcaggctgaagatgtggcagtttattactgtcagcaacattatagtactccattcacttttggccctgggaccaaagtggatatcaaa

SEQ ID NO: 211 - protein, 117 aa, Artificial Sequence
  VH-P of MCSP-G4
EVQLLESGAEVKRPGASMKVSCKASGYTFTNYYIHWVRQAPGQGLEWMGWINPNSGATNYAQKFQGRVTMTRDTSTSTVYMELSSLRSEDTAVYYCAKSWVSWFASWGQGTLVTVSS

SEQ ID NO: 212 - DNA, 351 bp, Artificial Sequence
  VH-P of MCSP-G4
gaggtgcagctgctcgagtctggggctgaggtgaagaggcctggggcctcaatgaaggtctcctgcaaggcttctgggtacaccttcaccaactactatatacactgggtgcgacaggcccctggacaaggtcttgagtggatgggttggatcaaccctaacagtggtgccacaaactatgcacagaagttccagggcagagtcaccatgaccagggacacgtccacgagcacagtctacatggagctgagcagcctgagatctgaggacacggccgtgtattactgtgcgaaatcctgggtctcctggtttgcttcctggggtcaaggaaccttggtcaccgtctcctca

SEQ ID NO: 213 - protein, 113 aa, Artificial Sequence
  VL-P of MCSP-G4
ELVMTQSPDSLAVSLGERATINCKSSQSVLNSSNNRNYLAWYQQKPGQPPKLLIYWASTRESGVPDRFSGSGSGTDFTLTISGLQAEDVAVYYCQQHYSTPFTFGPGTKVDIK

SEQ ID NO: 214 - DNA, 339 bp, Artificial Sequence
  VL-P of MCSP-G4
gagctcgtgatgacccagtctccagactccctggctgtgtctctgggcgagagggccaccatcaactgcaagtccagccagagtgttttaaacagctccaacaataggaactacttagcttggtaccagcagaaaccaggacagcctcctaagctgctcatttactgggcatctacccgggaatccggggtccctgaccgattcagtggcagcgggtctgggacagatttcactctcaccatcagtggcctgcaggctgaagatgtggcagtttattactgtcagcaacattatagtactccattcacttttggccctgggaccaaagtggatatcaaa

SEQ ID NO: 215 - protein, 245 aa, Artificial Sequence
  VH-VL of MCSP-G4
QVQLVQSGAEVKRPGASMKVSCKASGYTFTNYYIHWVRQAPGQGLEWMGWINPNSGATNYAQKFQGRVTMTRDTSTSTVYMELSSLRSEDTAVYYCAKSWVSWFASWGQGTLVTVSSGGGGSGGGGSGGGGSDIVMTQSPDSLAVSLGERATINCKSSQSVLNSSNNRNYLAWYQQKPGQPPKLLIYWASTRESGVPDRFSGSGSGTDFTLTISGLQAEDVAVYYCQQHYSTPFTFGPGTKVDIK

SEQ ID NO: 216 - DNA, 735 bp, Artificial Sequence
  VH-VL of MCSP-G4
caggtgcagctggtccagtctggggctgaggtgaagaggcctggggcctcaatgaaggtctcctgcaaggcttctgggtacaccttcaccaactactatatacactgggtgcgacaggcccctggacaaggtcttgagtggatgggttggatcaaccctaacagtggtgccacaaactatgcacagaagttccagggcagagtcaccatgaccagggacacgtccacgagcacagtctacatggagctgagcagcctgagatctgaggacacggccgtgtattactgtgcgaaatcctgggtctcctggtttgcttcctggggtcaaggaaccttggtcaccgtctcctcaggtggtggtggttctggcggcggcggctccggtggtggtggttctgatatcgtgatgacccagtctccagactccctggctgtgtctctgggcgagagggccaccatcaactgcaagtccagccagagtgttttaaacagctccaacaataggaactacttagcttggtaccagcagaaaccaggacagcctcctaagctgctcatttactgggcatctacccgggaatccggggtccctgaccgattcagtggcagcgggtctgggacagatttcactctcaccatcagtggcctgcaggctgaagatgtggcagtttattactgtcagcaacattatagtactccattcacttttggccctgggaccaaagtggatatcaaa

SEQ ID NO: 217 - protein, 245 aa, Artificial Sequence
  VH-VL-P of MCSP-G4
EVQLLESGAEVKRPGASMKVSCKASGYTFTNYYIHWVRQAPGQGLEWMGWINPNSGATNYAQKFQGRVTMTRDTSTSTVYMELSSLRSEDTAVYYCAKSWVSWFASWGQGTLVTVSSGGGGSGGGGSGGGGSELVMTQSPDSLAVSLGERATINCKSSQSVLNSSNNRNYLAWYQQKPGQPPKLLIYWASTRESGVPDRFSGSGSGTDFTLTISGLQAEDVAVYYCQQHYSTPFTFGPGTKVDIK

SEQ ID NO: 218 - DNA, 735 bp, Artificial Sequence
  VH-VL-P of MCSP-G4
gaggtgcagctgctcgagtctggggctgaggtgaagaggcctggggcctcaatgaaggtctcctgcaaggcttctgggtacaccttcaccaactactatatacactgggtgcgacaggcccctggacaaggtcttgagtggatgggttggatcaaccctaacagtggtgccacaaactatgcacagaagttccagggcagagtcaccatgaccagggacacgtccacgagcacagtctacatggagctgagcagcctgagatctgaggacacggccgtgtattactgtgcgaaatcctgggtctcctggtttgcttcctggggtcaaggaaccttggtcaccgtctcctcaggtggtggtggttctggcggcggcggctccggtggtggtggttctgagctcgtgatgacccagtctccagactccctggctgtgtctctgggcgagagggccaccatcaactgcaagtccagccagagtgttttaaacagctccaacaataggaactacttagcttggtaccagcagaaaccaggacagcctcctaagctgctcatttactgggcatctacccgggaatccggggtccctgaccgattcagtggcagcgggtctgggacagatttcactctcaccatcagtggcctgcaggctgaagatgtggcagtttattactgtcagcaacattatagtactccattcacttttggccctgggaccaaagtggatatcaaa

SEQ ID NO: 219 - protein, 17 aa, Artificial Sequence
  CDR-L1 of MCSP-D2
KSSQSVLNSSNNRNYLA

SEQ ID NO: 220 - protein, 7 aa, Artificial Sequence
  CDR-L2 of MCSP-D2
WASTRES

SEQ ID NO: 221 - protein, 9 aa, Artificial Sequence
  CDR-L3 of MCSP-D2
QQHYSTPFT

SEQ ID NO: 222 - protein, 5 aa, Artificial Sequence
  CDR-H1 of MCSP-D2
GYYMH

SEQ ID NO: 223 - protein, 17 aa, Artificial Sequence
  CDR-H2 of MCSP-D2
WINPNSGGTSYAQKFQG

SEQ ID NO: 224 - protein, 8 aa, Artificial Sequence
  CDR-H3 of MCSP-D2
SWVSWFAS

SEQ ID NO: 225 - protein, 117 aa, Artificial Sequence
  VH of MCSP-D2
QVQLVQSGAEVKKPGASVKVSCKASGYTFTGYYMHWVRQAPGQGLEWMGWINPNSGGTSYAQKFQGRVTMTRDTSTSTVYMELSNLRSDDTAVYYCAKSWVSWFASWGQGTLVTVSS

SEQ ID NO: 226 - DNA, 351 bp, Artificial Sequence
  VH of MCSP-D2
caggtgcagctggtccagtctggggctgaggtgaagaagcctggggcctcagtgaaggtctcctgcaaggcttctggatacaccttcaccggctactatatgcactgggtgcgacaggcccctggacaagggcttgagtggatgggatggatcaaccctaacagtggtggcacaagctacgcacagaagttccagggcagagtcaccatgactagggacacgtccacgagcacagtctacatggagctgagcaacctgagatctgacgacacggccgtgtattactgtgcgaaatcctgggtctcctggtttgcttcctggggtcaaggaaccttggtcaccgtctcctca

SEQ ID NO: 227 - protein, 113 aa, Artificial Sequence; identical to SEQ ID NO: 209
  VL of MCSP-D2

SEQ ID NO: 228 - DNA, 339 bp, Artificial Sequence; identical to SEQ ID NO: 210
  VL of MCSP-D2

SEQ ID NO: 229 - protein, 117 aa, Artificial Sequence
  VH-P of MCSP-D2
EVQLLESGAEVKKPGASVKVSCKASGYTFTGYYMHWVRQAPGQGLEWMGWINPNSGGTSYAQKFQGRVTMTRDTSTSTVYMELSNLRSDDTAVYYCAKSWVSWFASWGQGTLVTVSS

SEQ ID NO: 230 - DNA, 351 bp, Artificial Sequence
  VH-P of MCSP-D2
gaggtgcagctgctcgagtctggggctgaggtgaagaagcctggggcctcagtgaaggtctcctgcaaggcttctggatacaccttcaccggctactatatgcactgggtgcgacaggcccctggacaagggcttgagtggatgggatggatcaaccctaacagtggtggcacaagctacgcacagaagttccagggcagagtcaccatgactagggacacgtccacgagcacagtctacatggagctgagcaacctgagatctgacgacacggccgtgtattactgtgcgaaatcctgggtctcctggtttgcttcctggggtcaaggaaccttggtcaccgtctcctca

SEQ ID NO: 231 - protein, 113 aa, Artificial Sequence; identical to SEQ ID NO: 213
  VL-P of MCSP-D2

SEQ ID NO: 232 - DNA, 339 bp, Artificial Sequence; identical to SEQ ID NO: 214
  VL-P of MCSP-D2

SEQ ID NO: 233 - protein, 245 aa, Artificial Sequence
  VH-VL of MCSP-D2
QVQLVQSGAEVKKPGASVKVSCKASGYTFTGYYMHWVRQAPGQGLEWMGWINPNSGGTSYAQKFQGRVTMTRDTSTSTVYMELSNLRSDDTAVYYCAKSWVSWFASWGQGTLVTVSSGGGGSGGGGSGGGGSDIVMTQSPDSLAVSLGERATINCKSSQSVLNSSNNRNYLAWYQQKPGQPPKLLIYWASTRESGVPDRFSGSGSGTDFTLTISGLQAEDVAVYYCQQHYSTPFTFGPGTKVDIK

SEQ ID NO: 234 - DNA, 735 bp, Artificial Sequence
  VH-VL of MCSP-D2
caggtgcagctggtccagtctggggctgaggtgaagaagcctggggcctcagtgaaggtctcctgcaaggcttctggatacaccttcaccggctactatatgcactgggtgcgacaggcccctggacaagggcttgagtggatgggatggatcaaccctaacagtggtggcacaagctacgcacagaagttccagggcagagtcaccatgactagggacacgtccacgagcacagtctacatggagctgagcaacctgagatctgacgacacggccgtgtattactgtgcgaaatcctgggtctcctggtttgcttcctggggtcaaggaaccttggtcaccgtctcctcaggtggtggtggttctggcggcggcggctccggtggtggtggttctgatatcgtgatgacccagtctccagactccctggctgtgtctctgggcgagagggccaccatcaactgcaagtccagccagagtgttttaaacagctccaacaataggaactacttagcttggtaccagcagaaaccaggacagcctcctaagctgctcatttactgggcatctacccgggaatccggggtccctgaccgattcagtggcagcgggtctgggacagatttcactctcaccatcagtggcctgcaggctgaagatgtggcagtttattactgtcagcaacattatagtactccattcacttttggccctgggaccaaagtggatatcaaa

SEQ ID NO: 235 - protein, 245 aa, Artificial Sequence
  VH-VL-P of MCSP-D2
EVQLLESGAEVKKPGASVKVSCKASGYTFTGYYMHWVRQAPGQGLEWMGWINPNSGGTSYAQKFQGRVTMTRDTSTSTVYMELSNLRSDDTAVYYCAKSWVSWFASWGQGTLVTVSSGGGGSGGGGSGGGGSELVMTQSPDSLAVSLGERATINCKSSQSVLNSSNNRNYLAWYQQKPGQPPKLLIYWASTRESGVPDRFSGSGSGTDFTLTISGLQAEDVAVYYCQQHYSTPFTFGPGTKVDIK

SEQ ID NO: 236 - DNA, 735 bp, Artificial Sequence
  VH-VL-P of MCSP-D2
gaggtgcagctgctcgagtctggggctgaggtgaagaagcctggggcctcagtgaaggtctcctgcaaggcttctggatacaccttcaccggctactatatgcactgggtgcgacaggcccctggacaagggcttgagtggatgggatggatcaaccctaacagtggtggcacaagctacgcacagaagttccagggcagagtcaccatgactagggacacgtccacgagcacagtctacatggagctgagcaacctgagatctgacgacacggccgtgtattactgtgcgaaatcctgggtctcctggtttgcttcctggggtcaaggaaccttggtcaccgtctcctcaggtggtggtggttctggcggcggcggctccggtggtggtggttctgagctcgtgatgacccagtctccagactccctggctgtgtctctgggcgagagggccaccatcaactgcaagtccagccagagtgttttaaacagctccaacaataggaactacttagcttggtaccagcagaaaccaggacagcctcctaagctgctcatttactgggcatctacccgggaatccggggtccctgaccgattcagtggcagcgggtctgggacagatttcactctcaccatcagtggcctgcaggctgaagatgtggcagtttattactgtcagcaacattatagtactccattcacttttggccctgggaccaaagtggatatcaaa

SEQ ID NO: 237 - protein, 17 aa, Artificial Sequence
  CDR-L1 of MCSP-F9
KSSQSVLSSSNNKNYLN

SEQ ID NO: 238 - protein, 7 aa, Artificial Sequence
  CDR-L2 of MCSP-F9
WASTRES

SEQ ID NO: 239 - protein, 9 aa, Artificial Sequence
  CDR-L3 of MCSP-F9
QQHYSVPFT

SEQ ID NO: 240 - protein, 6 aa, Artificial Sequence
  CDR-H1 of MCSP-F9
SSNWWS

SEQ ID NO: 241 - protein, 16 aa, Artificial Sequence
  CDR-H2 of MCSP-F9
TIYYNGNTYYNPSLKS

SEQ ID NO: 242 - protein, 8 aa, Artificial Sequence
  CDR-H3 of MCSP-F9
SWVSWFAS

SEQ ID NO: 243 - protein, 117 aa, Artificial Sequence
  VH of MCSP-F9
QVQLQESGPGLVKPSETLSLTCVVSGGSISSSNWWSWVRQPPGKGLEWLGTIYYNGNTYYNPSLKSRVTISVDTSKNQFSLRLSSVTAADTAVYYCAKSWVSWFASWGQGTLVTVSS

SEQ ID NO: 244 - DNA, 351 bp, Artificial Sequence
  VH of MCSP-F9
caggtgcagctgcaagagtctggcccaggactggtgaagccttcggagaccctgtccctcacctgcgttgtctctggtggctccatcagcagtagtaactggtggagctgggtccgccagcccccagggaagggactggagtggcttgggactatctattataatgggaatacctactacaacccgtccctcaagagtcgagtcaccatctccgtagacacgtccaagaaccagttctccctgaggctgagctctgtgaccgccgcagacacggccgtgtattactgtgcgaaatcctgggtctcctggtttgcttcctggggtcaaggaaccttggtcaccgtctcctca

SEQ ID NO: 245 - protein, 113 aa, Artificial Sequence
  VL of MCSP-F9
DIVMTQSPDSLAVSLGERATINCKSSQSVLSSSNNKNYLNWYQQKPGQPPKLLIYWASTRESGVPDRFSGSGSGTDFTLTISSLQAEDVAVYYCQQHYSVPFTFGPGTKVDIK

SEQ ID NO: 246 - DNA, 339 bp, Artificial Sequence
  VL of MCSP-F9
gatatcgtgatgacacagtctccagactccctggctgtgtctctgggcgagagggccaccatcaactgcaagtccagccagagtgtcttatccagctccaacaataagaactacttaaattggtaccagcagaaaccaggacagcctcctaagttgctcatttactgggcatctacccgggaatccggggtccctgaccgattcagtggcagcgggtctgggacagatttcactctcaccatcagcagcctgcaggctgaagatgtggcagtttattactgtcagcaacattatagtgttccattcactttcggccctgggaccaaagtggatatcaaa

SEQ ID NO: 247 - protein, 117 aa, Artificial Sequence
  VH-P of MCSP-F9
EVQLLESGPGLVKPSETLSLTCVVSGGSISSSNWWSWVRQPPGKGLEWLGTIYYNGNTYYNPSLKSRVTISVDTSKNQFSLRLSSVTAADTAVYYCAKSWVSWFASWGQGTLVTVSS

SEQ ID NO: 248 - DNA, 351 bp, Artificial Sequence
  VH-P of MCSP-F9
gaggtgcagctgctcgagtctggcccaggactggtgaagccttcggagaccctgtccctcacctgcgttgtctctggtggctccatcagcagtagtaactggtggagctgggtccgccagcccccagggaagggactggagtggcttgggactatctattataatgggaatacctactacaacccgtccctcaagagtcgagtcaccatctccgtagacacgtccaagaaccagttctccctgaggctgagctctgtgaccgccgcagacacggccgtgtattactgtgcgaaatcctgggtctcctggtttgcttcctggggtcaaggaaccttggtcaccgtctcctca

SEQ ID NO: 249 - protein, 113 aa, Artificial Sequence
  VL-P of MCSP-F9
ELVMTQSPDSLAVSLGERATINCKSSQSVLSSSNNKNYLNWYQQKPGQPPKLLIYWASTRESGVPDRFSGSGSGTDFTLTISSLQAEDVAVYYCQQHYSVPFTFGPGTKVDIK

SEQ ID NO: 250 - DNA, 339 bp, Artificial Sequence
  VL-P of MCSP-F9
gagctcgtgatgacacagtctccagactccctggctgtgtctctgggcgagagggccaccatcaactgcaagtccagccagagtgtcttatccagctccaacaataagaactacttaaattggtaccagcagaaaccaggacagcctcctaagttgctcatttactgggcatctacccgggaatccggggtccctgaccgattcagtggcagcgggtctgggacagatttcactctcaccatcagcagcctgcaggctgaagatgtggcagtttattactgtcagcaacattatagtgttccattcactttcggccctgggaccaaagtggatatcaaa

SEQ ID NO: 251 - protein, 245 aa, Artificial Sequence
  VH-VL of MCSP-F9
QVQLQESGPGLVKPSETLSLTCVVSGGSISSSNWWSWVRQPPGKGLEWLGTIYYNGNTYYNPSLKSRVTISVDTSKNQFSLRLSSVTAADTAVYYCAKSWVSWFASWGQGTLVTVSSGGGGSGGGGSGGGGSDIVMTQSPDSLAVSLGERATINCKSSQSVLSSSNNKNYLNWYQQKPGQPPKLLIYWASTRESGVPDRFSGSGSGTDFTLTISSLQAEDVAVYYCQQHYSVPFTFGPGTKVDIK

SEQ ID NO: 252 - DNA, 735 bp, Artificial Sequence
  VH-VL of MCSP-F9
caggtgcagctgcaagagtctggcccaggactggtgaagccttcggagaccctgtccctcacctgcgttgtctctggtggctccatcagcagtagtaactggtggagctgggtccgccagcccccagggaagggactggagtggcttgggactatctattataatgggaatacctactacaacccgtccctcaagagtcgagtcaccatctccgtagacacgtccaagaaccagttctccctgaggctgagctctgtgaccgccgcagacacggccgtgtattactgtgcgaaatcctgggtctcctggtttgcttcctggggtcaaggaaccttggtcaccgtctcctcaggtggtggtggttctggcggcggcggctccggtggtggtggttctgatatcgtgatgacacagtctccagactccctggctgtgtctctgggcgagagggccaccatcaactgcaagtccagccagagtgtcttatccagctccaacaataagaactacttaaattggtaccagcagaaaccaggacagcctcctaagttgctcatttactgggcatctacccgggaatccggggtccctgaccgattcagtggcagcgggtctgggacagatttcactctcaccatcagcagcctgcaggctgaagatgtggcagtttattactgtcagcaacattatagtgttccattcactttcggccctgggaccaaagtggatatcaaa

SEQ ID NO: 253 - protein, 245 aa, Artificial Sequence
  VH-VL-P of MCSP-F9
EVQLLESGPGLVKPSETLSLTCVVSGGSISSSNWWSWVRQPPGKGLEWLGTIYYNGNTYYNPSLKSRVTISVDTSKNQFSLRLSSVTAADTAVYYCAKSWVSWFASWGQGTLVTVSSGGGGSGGGGSGGGGSELVMTQSPDSLAVSLGERATINCKSSQSVLSSSNNKNYLNWYQQKPGQPPKLLIYWASTRESGVPDRFSGSGSGTDFTLTISSLQAEDVAVYYCQQHYSVPFTFGPGTKVDIK

SEQ ID NO: 254 - DNA, 735 bp, Artificial Sequence
  VH-VL-P of MCSP-F9
gaggtgcagctgctcgagtctggcccaggactggtgaagccttcggagaccctgtccctcacctgcgttgtctctggtggctccatcagcagtagtaactggtggagctgggtccgccagcccccagggaagggactggagtggcttgggactatctattataatgggaatacctactacaacccgtccctcaagagtcgagtcaccatctccgtagacacgtccaagaaccagttctccctgaggctgagctctgtgaccgccgcagacacggccgtgtattactgtgcgaaatcctgggtctcctggtttgcttcctggggtcaaggaaccttggtcaccgtctcctcaggtggtggtggttctggcggcggcggctccggtggtggtggttctgagctcgtgatgacacagtctccagactccctggctgtgtctctgggcgagagggccaccatcaactgcaagtccagccagagtgtcttatccagctccaacaataagaactacttaaattggtaccagcagaaaccaggacagcctcctaagttgctcatttactgggcatctacccgggaatccggggtccctgaccgattcagtggcagcgggtctgggacagatttcactctcaccatcagcagcctgcaggctgaagatgtggcagtttattactgtcagcaacattatagtgttccattcactttcggccctgggaccaaagtggatatcaaa

SEQ ID NO: 255 - protein, 11 aa, Artificial Sequence
  CDR-L1 of IgE-D4
RASQSVSSNLA

SEQ ID NO: 256 - protein, 7 aa, Artificial Sequence
  CDR-L2 of IgE-D4
DASNRAT

SEQ ID NO: 257 - protein, 9 aa, Artificial Sequence
  CDR-L3 of IgE-D4
QQFGDTLWT

SEQ ID NO: 258 - protein, 5 aa, Artificial Sequence
  CDR-H1 of IgE-D4
SYAMS

SEQ ID NO: 259 - protein, 16 aa, Artificial Sequence
  CDR-H2 of IgE-D4
SISSGNIIYYPDNVKG

SEQ ID NO: 260 - protein, 10 aa, Artificial Sequence
  CDR-H3 of IgE-D4
GRSTYGGFDH

SEQ ID NO: 261 - protein, 118 aa, Artificial Sequence
  VH of IgE-D4
EVQLLESGGGLVQPGGSLRLSCAASGFTFSSYAMSWVRQAPGKGLEWVASISSGNIIYYPDNVKGRFTISRDNSKNTLYLQMNSLRAEDTAVYYCTRGRSTYGGFDHWGQGTTVTVSS

SEQ ID NO: 262 - DNA, 354 bp, Artificial Sequence
  VH of IgE-D4
gaggtgcagctgctcgagtctgggggaggccttgtgcagcctggagggtctctgaggctctcctgtgcagcctctggattcactttcagtagttatgccatgtcttgggttcgccaggctccagggaaggggctggagtgggtcgcttccattagtagtggtaatatcatctactatccagacaatgtgaagggccgattcaccatctctagagataattccaagaacaccctgtacctgcaaatgaacagtctgagggctgaggacacggccgtgtattattgtactagaggccgcagtacctacgggggatttgaccactggggccaaggcaccacagtcaccgtctcctca

SEQ ID NO: 263 - protein, 107 aa, Artificial Sequence
  VL of IgE-D4
EIVLTQSPATLSVSPGERATLSCRASQSVSSNLAWYQQKPGQAPRLLIYDASNRATGIPARFSGSGSGTDFTLTISSLEPEDFAVYYCQQFGDTLWTFGQGTKVEIK

SEQ ID NO: 264 - DNA, 321 bp, Artificial Sequence
  VL of IgE-D4
gagatcgtgttgacacagtctccagccaccctgtctgtgtctccaggggaaagagccaccctctcctgcagggccagtcagagtgttagcagcaacttagcctggtaccagcagaaacctggccaggctcccaggctcctcatctatgatgcatccaacagggccactggcatcccagccaggttcagtggcagtgggtctgggacagacttcactctcaccatcagcagcctagagcctgaagattttgcagtttattactgtcagcagttcggtgatacactgtggacgttcggccaagggaccaaggtggagatcaaa

SEQ ID NO: 265 - protein, 118 aa, Artificial Sequence; identical to SEQ ID NO: 261
  VH-P of IgE-D4

SEQ ID NO: 266 - DNA, 354 bp, Artificial Sequence; identical to SEQ ID NO: 262
  VH-P of IgE-D4

SEQ ID NO: 267 - protein, 107 aa, Artificial Sequence
  VL-P of IgE-D4
ELVLTQSPATLSVSPGERATLSCRASQSVSSNLAWYQQKPGQAPRLLIYDASNRATGIPARFSGSGSGTDFTLTISSLEPEDFAVYYCQQFGDTLWTFGQGTKVEIK

SEQ ID NO: 268 - DNA, 321 bp, Artificial Sequence
  VL-P of IgE-D4
gagctcgtgttgacacagtctccagccaccctgtctgtgtctccaggggaaagagccaccctctcctgcagggccagtcagagtgttagcagcaacttagcctggtaccagcagaaacctggccaggctcccaggctcctcatctatgatgcatccaacagggccactggcatcccagccaggttcagtggcagtgggtctgggacagacttcactctcaccatcagcagcctagagcctgaagattttgcagtttattactgtcagcagttcggtgatacactgtggacgttcggccaagggaccaaggtggagatcaaa

SEQ ID NO: 269 - protein, 240 aa, Artificial Sequence
  VH-VL of IgE-D4
EVQLLESGGGLVQPGGSLRLSCAASGFTFSSYAMSWVRQAPGKGLEWVASISSGNIIYYPDNVKGRFTISRDNSKNTLYLQMNSLRAEDTAVYYCTRGRSTYGGFDHWGQGTTVTVSSGGGGSGGGGSGGGGSEIVLTQSPATLSVSPGERATLSCRASQSVSSNLAWYQQKPGQAPRLLIYDASNRATGIPARFSGSGSGTDFTLTISSLEPEDFAVYYCQQFGDTLWTFGQGTKVEIK

SEQ ID NO: 270 - DNA, 720 bp, Artificial Sequence
  VH-VL of IgE-D4
gaggtgcagctgctcgagtctgggggaggccttgtgcagcctggagggtctctgaggctctcctgtgcagcctctggattcactttcagtagttatgccatgtcttgggttcgccaggctccagggaaggggctggagtgggtcgcttccattagtagtggtaatatcatctactatccagacaatgtgaagggccgattcaccatctctagagataattccaagaacaccctgtacctgcaaatgaacagtctgagggctgaggacacggccgtgtattattgtactagaggccgcagtacctacgggggatttgaccactggggccaaggcaccacagtcaccgtctcctcaggtggtggtggttctggcggcggcggctccggtggtggtggttctgagatcgtgttgacacagtctccagccaccctgtctgtgtctccaggggaaagagccaccctctcctgcagggccagtcagagtgttagcagcaacttagcctggtaccagcagaaacctggccaggctcccaggctcctcatctatgatgcatccaacagggccactggcatcccagccaggttcagtggcagtgggtctgggacagacttcactctcaccatcagcagcctagagcctgaagattttgcagtttattactgtcagcagttcggtgatacactgtggacgttcggccaagggaccaaggtggagatcaaa

SEQ ID NO: 271 - protein, 240 aa, Artificial Sequence
  VH-VL-P of IgE-D4
EVQLLESGGGLVQPGGSLRLSCAASGFTFSSYAMSWVRQAPGKGLEWVASISSGNIIYYPDNVKGRFTISRDNSKNTLYLQMNSLRAEDTAVYYCTRGRSTYGGFDHWGQGTTVTVSSGGGGSGGGGSGGGGSELVLTQSPATLSVSPGERATLSCRASQSVSSNLAWYQQKPGQAPRLLIYDASNRATGIPARFSGSGSGTDFTLTISSLEPEDFAVYYCQQFGDTLWTFGQGTKVEIK

SEQ ID NO: 272 - DNA, 720 bp, Artificial Sequence
  VH-VL-P of IgE-D4
gaggtgcagctgctcgagtctgggggaggccttgtgcagcctggagggtctctgaggctctcctgtgcagcctctggattcactttcagtagttatgccatgtcttgggttcgccaggctccagggaaggggctggagtgggtcgcttccattagtagtggtaatatcatctactatccagacaatgtgaagggccgattcaccatctctagagataattccaagaacaccctgtacctgcaaatgaacagtctgagggctgaggacacggccgtgtattattgtactagaggccgcagtacctacgggggatttgaccactggggccaaggcaccacagtcaccgtctcctcaggtggtggtggttctggcggcggcggctccggtggtggtggttctgagctcgtgttgacacagtctccagccaccctgtctgtgtctccaggggaaagagccaccctctcctgcagggccagtcagagtgttagcagcaacttagcctggtaccagcagaaacctggccaggctcccaggctcctcatctatgatgcatccaacagggccactggcatcccagccaggttcagtggcagtgggtctgggacagacttcactctcaccatcagcagcctagagcctgaagattttgcagtttattactgtcagcagttcggtgatacactgtggacgttcggccaagggaccaaggtggagatcaaa

SEQ ID NO: 273 - protein, 11 aa, Artificial Sequence
  CDR-L1 of IgE-G9
WASQGVSNNLA

SEQ ID NO: 274 - protein, 7 aa, Artificial Sequence
  CDR-L2 of IgE-G9
DAFNRAT

SEQ ID NO: 275 - protein, 9 aa, Artificial Sequence
  CDR-L3 of IgE-G9
QQFGDSLWT

SEQ ID NO: 276 - protein, 5 aa, Artificial Sequence
  CDR-H1 of IgE-G9
SYAMS

SEQ ID NO: 277 - protein, 16 aa, Artificial Sequence
  CDR-H2 of IgE-G9
SISSGNIIYYPDNVKG

SEQ ID NO: 278 - protein, 10 aa, Artificial Sequence
  CDR-H3 of IgE-G9
GRSTYGGFDH

SEQ ID NO: 279 - protein, 118 aa, Artificial Sequence; identical to SEQ ID NO: 261
  VH of IgE-G9

SEQ ID NO: 280 - DNA, 354 bp, Artificial Sequence; identical to SEQ ID NO: 262
  VH of IgE-G9

SEQ ID NO: 281 - protein, 107 aa, Artificial Sequence
  VL of IgE-G9
EIVMTQSPATLSVSPGERVTLSCWASQGVSNNLAWYQQRPGQAPRLLIYDAFNRATGIPARFSGSGSGTDFTLTISRLEPEDFAVYYCQQFGDSLWTFGQGTKLEIK

SEQ ID NO: 282 - DNA, 321 bp, Artificial Sequence
  VL of IgE-G9
gagatcgtgatgacacagtctccagccaccctgtctgtgtctccaggggaaagagtcaccctctcctgctgggccagtcagggtgtgagcaacaacttagcctggtaccagcagagacctggccaggctcccaggctcctcatctatgatgcattcaacagggccactggcatcccagccaggttcagtggcagtgggtctgggacagacttcactctcaccatcagcagactggagcctgaagattttgcggtgtattactgtcagcagtttggtgattcactttggacgttcggccaggggaccaagctggaaatcaaa

SEQ ID NO: 283 - protein, 118 aa, Artificial Sequence; identical to SEQ ID NO: 261
  VH-P of IgE-G9

SEQ ID NO: 284 - DNA, 354 bp, Artificial Sequence; identical to SEQ ID NO: 262
  VH-P of IgE-G9

SEQ ID NO: 285 - protein, 107 aa, Artificial Sequence
  VL-P of IgE-G9
ELVMTQSPATLSVSPGERVTLSCWASQGVSNNLAWYQQRPGQAPRLLIYDAFNRATGIPARFSGSGSGTDFTLTISRLEPEDFAVYYCQQFGDSLWTFGQGTKLEIK

SEQ ID NO: 286 - DNA, 321 bp, Artificial Sequence
  VL-P of IgE-G9
gagctcgtgatgacacagtctccagccaccctgtctgtgtctccaggggaaagagtcaccctctcctgctgggccagtcagggtgtgagcaacaacttagcctggtaccagcagagacctggccaggctcccaggctcctcatctatgatgcattcaacagggccactggcatcccagccaggttcagtggcagtgggtctgggacagacttcactctcaccatcagcagactggagcctgaagattttgcggtgtattactgtcagcagtttggtgattcactttggacgttcggccaggggaccaagctggaaatcaaa

SEQ ID NO: 287 - protein, 240 aa, Artificial Sequence
  VH-VL of IgE-G9
EVQLLESGGGLVQPGGSLRLSCAASGFTFSSYAMSWVRQAPGKGLEWVASISSGNIIYYPDNVKGRFTISRDNSKNTLYLQMNSLRAEDTAVYYCTRGRSTYGGFDHWGQGTTVTVSSGGGGSGGGGSGGGGSEIVMTQSPATLSVSPGERVTLSCWASQGVSNNLAWYQQRPGQAPRLLIYDAFNRATGIPARFSGSGSGTDFTLTISRLEPEDFAVYYCQQFGDSLWTFGQGTKLEIK

SEQ ID NO: 288 - DNA, 720 bp, Artificial Sequence
  VH-VL of IgE-G9
gaggtgcagctgctcgagtctgggggaggccttgtgcagcctggagggtctctgaggctctcctgtgcagcctctggattcactttcagtagttatgccatgtcttgggttcgccaggctccagggaaggggctggagtgggtcgcttccattagtagtggtaatatcatctactatccagacaatgtgaagggccgattcaccatctctagagataattccaagaacaccctgtacctgcaaatgaacagtctgagggctgaggacacggccgtgtattattgtactagaggccgcagtacctacgggggatttgaccactggggccaaggcaccacagtcaccgtctcctcaggtggtggtggttctggcggcggcggctccggtggtggtggttctgagatcgtgatgacacagtctccagccaccctgtctgtgtctccaggggaaagagtcaccctctcctgctgggccagtcagggtgtgagcaacaacttagcctggtaccagcagagacctggccaggctcccaggctcctcatctatgatgcattcaacagggccactggcatcccagccaggttcagtggcagtgggtctgggacagacttcactctcaccatcagcagactggagcctgaagattttgcggtgtattactgtcagcagtttggtgattcactttggacgttcggccaggggaccaagctggaaatcaaa

SEQ ID NO: 289 - protein, 240 aa, Artificial Sequence
  VH-VL-P of IgE-G9
EVQLLESGGGLVQPGGSLRLSCAASGFTFSSYAMSWVRQAPGKGLEWVASISSGNIIYYPDNVKGRFTISRDNSKNTLYLQMNSLRAEDTAVYYCTRGRSTYGGFDHWGQGTTVTVSSGGGGSGGGGSGGGGSELVMTQSPATLSVSPGERVTLSCWASQGVSNNLAWYQQRPGQAPRLLIYDAFNRATGIPARFSGSGSGTDFTLTISRLEPEDFAVYYCQQFGDSLWTFGQGTKLEIK

SEQ ID NO: 290 - DNA, 720 bp, Artificial Sequence
  VH-VL-P of IgE-G9
gaggtgcagctgctcgagtctgggggaggccttgtgcagcctggagggtctctgaggctctcctgtgcagcctctggattcactttcagtagttatgccatgtcttgggttcgccaggctccagggaaggggctggagtgggtcgcttccattagtagtggtaatatcatctactatccagacaatgtgaagggccgattcaccatctctagagataattccaagaacaccctgtacctgcaaatgaacagtctgagggctgaggacacggccgtgtattattgtactagaggccgcagtacctacgggggatttgaccactggggccaaggcaccacagtcaccgtctcctcaggtggtggtggttctggcggcggcggctccggtggtggtggttctgagctcgtgatgacacagtctccagccaccctgtctgtgtctccaggggaaagagtcaccctctcctgctgggccagtcagggtgtgagcaacaacttagcctggtaccagcagagacctggccaggctcccaggctcctcatctatgatgcattcaacagggccactggcatcccagccaggttcagtggcagtgggtctgggacagacttcactctcaccatcagcagactggagcctgaagattttgcggtgtattactgtcagcagtttggtgattcactttggacgttcggccaggggaccaagctggaaatcaaa

SEQ ID NO: 291 - protein, 500 aa, Artificial Sequence
  EGF-R 21-63 VL-VH x F6A VH-VL-P
DIVLTQSPASLPVSLGQRATISCRASQSVSSSTYSYIHWYQQKPGQPPKLLITYASNLESGVPARFSGSGSGTDFTLDIHPVEEDDSSTYYCQHSWEIPFTFGSGTKLEIKGGGGSGGGGSGGGGSQVQLQQSGPDLVKPGASVKMSCKASGHTFTDCVIIWVKQRAGQGLEWIGQIYPGTGRSYYNEIFKGKATLTADKSSNTVHIQLSSLTSEDSAVYFCALSTLIHGTWFSYWGQGTLVTVSSGGGGSEVQLLESGGGLVQPGGSLKLSCAASGFTFNIYAMNWVRQAPGKGLEWVARIRSKYNNYATYYADSVKSRFTISRDDSKNTAYLQMNNLKTEDTAVYYCVRHGNFGNSYVSFFAYWGQGTLVTVSSGGGGSGGGGSGGGGSELVVTQEPSLTVSPGGTVTLTCGSSTGAVTSGYYPNWVQQKPGQAPRGLIGGTKFLAPGTPARFSGSLLGGKAALTLSGVQPEDEAEYYCALWYSNRWVFGGGTKLTVL

SEQ ID NO: 292 - DNA, 1500 bp, Artificial Sequence
  EGF-R 21-63 VL-VH x F6A VH-VL-P
gacattgtgctgacacagtctcctgcttccttacctgtgtctctggggcagagggccaccatctcatgcagggccagccaaagtgtcagttcatctacttatagttatatacactggtaccaacagaaaccaggacagccacccaaactcctcatcacgtatgcatccaacctagaatctggggtccctgccaggttcagtggcagtgggtctgggacagacttcaccctcgacatccatcctgtggaggaggatgattcttcaacatattactgtcagcacagttgggagattccatttacgttcggctcggggacaaagttggaaataaaaggtggtggtggttctggcggcggcggctccggtggtggtggttctcaggttcagctgcagcagtctggacctgatctggtgaagcctggggcctcagtgaagatgtcctgcaaggcttctggacacactttcactgactgtgttataatctgggtgaaacagagagctggacagggccttgagtggattggacagatttatccagggactggtcgttcttactacaatgagattttcaagggcaaggccacactgactgcagacaaatcctccaacacagtccacattcaactcagcagcctgacatctgaggactctgcggtctatttctgtgccctatctactcttattcacgggacctggttttcttattggggccaagggactctggtcactgtctcttccggaggtggtggctccgaggtgcagctgctcgagtctggaggaggattggtgcagcctggagggtcattgaaactctcatgtgcagcctctggattcaccttcaatatctacgccatgaactgggtccgccaggctccaggaaagggtttggaatgggttgctcgcataagaagtaaatataataattatgcaacatattatgccgattcagtgaaaagcaggttcaccatctccagagatgattcaaaaaacactgcctatctacaaatgaacaacttgaaaactgaggacactgccgtgtactactgtgtgagacatgggaacttcggtaatagctacgtatccttcttcgcttactggggccaagggactctggtcaccgtctcctcaggtggtggtggttctggcggcggcggctccggtggtggtggttctgagctcgttgtgactcaggaaccttcactcaccgtatcacctggtggaacagtcacactcacttgtggctcctcgactggggctgttacatctggctactacccaaactgggtccaacaaaaaccaggtcaggcaccccgtggtctaataggtgggactaagttcctcgcccccggtactcctgccagattctcaggctccctgcttggaggcaaggctgccctcaccctctcaggggtacagccagaggatgaggcagaatattactgtgctctatggtacagcaaccgctgggtgttcggtggaggaaccaaactgactgtccta

SEQ ID NO: 293 - protein, 500 aa, Artificial Sequence
  EGF-R 21-63 VL-VH x H2C VH-VL
DIVLTQSPASLPVSLGQRATISCRASQSVSSSTYSYIHWYQQKPGQPPKLLITYASNLESGVPARFSGSGSGTDFTLDIHPVEEDDSSTYYCQHSWEIPFTFGSGTKLEIKGGGGSGGGGSGGGGSQVQLQQSGPDLVKPGASVKMSCKASGHTFTDCVIIWVKQRAGQGLEWIGQIYPGTGRSYYNEIFKGKATLTADKSSNTVHIQLSSLTSEDSAVYFCALSTLIHGTWFSYWGQGTLVTVSSGGGGSEVQLVESGGGLVQPGGSLKLSCAASGFTFNKYAMNWVRQAPGKGLEWVARIRSKYNNYATYYADSVKDRFTISRDDSKNTAYLQMNNLKTEDTAVYYCVRHGNFGNSYISYWAYWGQGTLVTVSSGGGGSGGGGSGGGGSQTVVTQEPSLTVSPGGTVTLTCGSSTGAVTSGYYPNWVQQKPGQAPRGLIGGTKFLAPGTPARFSGSLLGGKAALTLSGVQPEDEAEYYCALWYSNRWVFGGGTKLTVL

SEQ ID NO: 294 - DNA, 1500 bp, Artificial Sequence
  EGF-R 21-63 VL-VH x H2C VH-VL
gacattgtgctgacacagtctcctgcttccttacctgtgtctctggggcagagggccaccatctcatgcagggccagccaaagtgtcagttcatctacttatagttatatacactggtaccaacagaaaccaggacagccacccaaactcctcatcacgtatgcatccaacctagaatctggggtccctgccaggttcagtggcagtgggtctgggacagacttcaccctcgacatccatcctgtggaggaggatgattcttcaacatattactgtcagcacagttgggagattccatttacgttcggctcggggacaaagttggaaataaaaggtggtggtggttctggcggcggcggctccggtggtggtggttctcaggttcagctgcagcagtctggacctgatctggtgaagcctggggcctcagtgaagatgtcctgcaaggcttctggacacactttcactgactgtgttataatctgggtgaaacagagagctggacagggccttgagtggattggacagatttatccagggactggtcgttcttactacaatgagattttcaagggcaaggccacactgactgcagacaaatcctccaacacagtccacattcaactcagcagcctgacatctgaggactctgcggtctatttctgtgccctatctactcttattcacgggacctggttttcttattggggccaagggactctggtcactgtctcttccggaggtggtggctccgaggtgcagctggtcgagtctggaggaggattggtgcagcctggagggtcattgaaactctcatgtgcagcctctggattcaccttcaataagtacgccatgaactgggtccgccaggctccaggaaagggtttggaatgggttgctcgcataagaagtaaatataataattatgcaacatattatgccgattcagtgaaagacaggttcaccatctccagagatgattcaaaaaacactgcctatctacaaatgaacaacttgaaaactgaggacactgccgtgtactactgtgtgagacatgggaacttcggtaatagctacatatcctactgggcttactggggccaagggactctggtcaccgtctcctcaggtggtggtggttctggcggcggcggctccggtggtggtggttctcagactgttgtgactcaggaaccttcactcaccgtatcacctggtggaacagtcacactcacttgtggctcctcgactggggctgttacatctggctactacccaaactgggtccaacaaaaaccaggtcaggcaccccgtggtctaataggtgggactaagttcctcgcccccggtactcctgccagattctcaggctccctgcttggaggcaaggctgccctcaccctctcaggggtacagccagaggatgaggcagaatattactgtgctctatggtacagcaaccgctgggtgttcggtggaggaaccaaactgactgtccta

SEQ ID NO: 295 - protein, 500 aa, Artificial Sequence
  EGF-R 21-63 VL-VH x H2C VH-VL-P
DIVLTQSPASLPVSLGQRATISCRASQSVSSSTYSYIHWYQQKPGQPPKLLITYASNLESGVPARFSGSGSGTDFTLDIHPVEEDDSSTYYCQHSWEIPFTFGSGTKLEIKGGGGSGGGGSGGGGSQVQLQQSGPDLVKPGASVKMSCKASGHTFTDCVIIWVKQRAGQGLEWIGQIYPGTGRSYYNEIFKGKATLTADKSSNTVHIQLSSLTSEDSAVYFCALSTLIHGTWFSYWGQGTLVTVSSGGGGSEVQLLESGGGLVQPGGSLKLSCAASGFTFNKYAMNWVRQAPGKGLEWVARIRSKYNNYATYYADSVKDRFTISRDDSKNTAYLQMNNLKTEDTAVYYCVRHGNFGNSYISYWAYWGQGTLVTVSSGGGGSGGGGSGGGGSELVVTQEPSLTVSPGGTVTLTCGSSTGAVTSGYYPNWVQQKPGQAPRGLIGGTKFLAPGTPARFSGSLLGGKAALTLSGVQPEDEAEYYCALWYSNRWVFGGGTKLTVL

SEQ ID NO: 296 - DNA, 1500 bp, Artificial Sequence
  EGF-R 21-63 VL-VH x H2C VH-VL-P
gacattgtgctgacacagtctcctgcttccttacctgtgtctctggggcagagggccaccatctcatgcagggccagccaaagtgtcagttcatctacttatagttatatacactggtaccaacagaaaccaggacagccacccaaactcctcatcacgtatgcatccaacctagaatctggggtccctgccaggttcagtggcagtgggtctgggacagacttcaccctcgacatccatcctgtggaggaggatgattcttcaacatattactgtcagcacagttgggagattccatttacgttcggctcggggacaaagttggaaataaaaggtggtggtggttctggcggcggcggctccggtggtggtggttctcaggttcagctgcagcagtctggacctgatctggtgaagcctggggcctcagtgaagatgtcctgcaaggcttctggacacactttcactgactgtgttataatctgggtgaaacagagagctggacagggccttgagtggattggacagatttatccagggactggtcgttcttactacaatgagattttcaagggcaaggccacactgactgcagacaaatcctccaacacagtccacattcaactcagcagcctgacatctgaggactctgcggtctatttctgtgccctatctactcttattcacgggacctggttttcttattggggccaagggactctggtcactgtctcttccggaggtggtggctccgaggtgcagctgctcgagtctggaggaggattggtgcagcctggagggtcattgaaactctcatgtgcagcctctggattcaccttcaataagtacgccatgaactgggtccgccaggctccaggaaagggtttggaatgggttgctcgcataagaagtaaatataataattatgcaacatattatgccgattcagtgaaagacaggttcaccatctccagagatgattcaaaaaacactgcctatctacaaatgaacaacttgaaaactgaggacactgccgtgtactactgtgtgagacatgggaacttcggtaatagctacatatcctactgggcttactggggccaagggactctggtcaccgtctcctcaggtggtggtggttctggcggcggcggctccggtggtggtggttctgagctcgttgtgactcaggaaccttcactcaccgtatcacctggtggaacagtcacactcacttgtggctcctcgactggggctgttacatctggctactacccaaactgggtccaacaaaaaccaggtcaggcaccccgtggtctaataggtgggactaagttcctcgcccccggtactcctgccagattctcaggctccctgcttggaggcaaggctgccctcaccctctcaggggtacagccagaggatgaggcagaatattactgtgctctatggtacagcaaccgctgggtgttcggtggaggaaccaaactgactgtccta

SEQ ID NO: 297 - protein, 500 aa, Artificial Sequence
  EGF-R 21-63 VL-VH x H1E VH-VL-P
DIVLTQSPASLPVSLGQRATISCRASQSVSSSTYSYIHWYQQKPGQPPKLLITYASNLESGVPARFSGSGSGTDFTLDIHPVEEDDSSTYYCQHSWEIPFTFGSGTKLEIKGGGGSGGGGSGGGGSQVQLQQSGPDLVKPGASVKMSCKASGHTFTDCVIIWVKQRAGQGLEWIGQIYPGTGRSYYNEIFKGKATLTADKSSNTVHIQLSSLTSEDSAVYFCALSTLIHGTWFSYWGQGTLVTVSSGGGGSEVQLLESGGGLEQPGGSLKLSCAASGFTFNSYAMNWVRQAPGKGLEWVARIRSKYNNYATYYADSVKGRFTISRDDSKNTAYLQMNNLKTEDTAVYYCVRHGNFGNSYLSFWAYWGQGTLVTVSSGGGGSGGGGSGGGGSELVVTQEPSLTVSPGGTVTLTCGSSTGAVTSGYYPNWVQQKPGQAPRGLIGGTKFLAPGTPARFSGSLLGGKAALTLSGVQPEDEAEYYCALWYSNRWVFGGGTKLTVL

SEQ ID NO: 298 - DNA, 1500 bp, Artificial Sequence
  EGF-R 21-63 VL-VH x H1E VH-VL-P
gacattgtgctgacacagtctcctgcttccttacctgtgtctctggggcagagggccaccatctcatgcagggccagccaaagtgtcagttcatctacttatagttatatacactggtaccaacagaaaccaggacagccacccaaactcctcatcacgtatgcatccaacctagaatctggggtccctgccaggttcagtggcagtgggtctgggacagacttcaccctcgacatccatcctgtggaggaggatgattcttcaacatattactgtcagcacagttgggagattccatttacgttcggctcggggacaaagttggaaataaaaggtggtggtggttctggcggcggcggctccggtggtggtggttctcaggttcagctgcagcagtctggacctgatctggtgaagcctggggcctcagtgaagatgtcctgcaaggcttctggacacactttcactgactgtgttataatctgggtgaaacagagagctggacagggccttgagtggattggacagatttatccagggactggtcgttcttactacaatgagattttcaagggcaaggccacactgactgcagacaaatcctccaacacagtccacattcaactcagcagcctgacatctgaggactctgcggtctatttctgtgccctatctactcttattcacgggacctggttttcttattggggccaagggactctggtcactgtctcttccggaggtggtggctccgaggtgcagctgctcgagtctggaggaggattggagcagcctggagggtcattgaaactctcatgtgcagcctctggattcaccttcaattcgtacgccatgaactgggtccgccaggctccaggaaagggtttggaatgggttgctcgcataagaagtaaatataataattatgcaacatattatgccgattcagtgaaagggaggttcaccatctccagagatgattcaaaaaacactgcctatctacaaatgaacaacttgaaaactgaggacactgccgtgtactactgtgtgagacatgggaacttcggtaatagctacctatccttctgggcttactggggccaagggactctggtcaccgtctcctcaggtggtggtggttctggcggcggcggctccggtggtggtggttctgagctcgttgtgactcaggaaccttcactcaccgtatcacctggtggaacagtcacactcacttgtggctcctcgactggggctgttacatctggctactacccaaactgggtccaacaaaaaccaggtcaggcaccccgtggtctaataggtgggactaagttcctcgcccccggtactcctgccagattctcaggctccctgcttggaggcaaggctgccctcaccctctcaggggtacagccagaggatgaggcagaatattactgtgctctatggtacagcaaccgctgggtgttcggtggaggaaccaaactgactgtccta

SEQ ID NO: 299 - protein, 500 aa, Artificial Sequence
  EGF-R 21-63 VL-VH x G4H VH-VL-P
DIVLTQSPASLPVSLGQRATISCRASQSVSSSTYSYIHWYQQKPGQPPKLLITYASNLESGVPARFSGSGSGTDFTLDIHPVEEDDSSTYYCQHSWEIPFTFGSGTKLEIKGGGGSGGGGSGGGGSQVQLQQSGPDLVKPGASVKMSCKASGHTFTDCVIIWVKQRAGQGLEWIGQIYPGTGRSYYNEIFKGKATLTADKSSNTVHIQLSSLTSEDSAVYFCALSTLIHGTWFSYWGQGTLVTVSSGGGGSEVQLLESGGGLVQPGGSLKLSCAASGFTFNRYAMNWVRQAPGKGLEWVARIRSKYNNYATYYADSVKGRFTISRDDSKNTAYLQMNNLKTEDTAVYYCVRHGNFGNSYLSYFAYWGQGTLVTVSSGGGGSGGGGSGGGGSELVVTQEPSLTVSPGGTVTLTCGSSTGAVTSGYYPNWVQQKPGQAPRGLIGGTKFLAPGTPARFSGSLLGGKAALTLSGVQPEDEAEYYCALWYSNRWVFGGGTKLTVL

SEQ ID NO: 300 - DNA, 1500 bp, Artificial Sequence
  EGF-R 21-63 VL-VH x G4H VH-VL-P
gacattgtgctgacacagtctcctgcttccttacctgtgtctctggggcagagggccaccatctcatgcagggccagccaaagtgtcagttcatctacttatagttatatacactggtaccaacagaaaccaggacagccacccaaactcctcatcacgtatgcatccaacctagaatctggggtccctgccaggttcagtggcagtgggtctgggacagacttcaccctcgacatccatcctgtggaggaggatgattcttcaacatattactgtcagcacagttgggagattccatttacgttcggctcggggacaaagttggaaataaaaggtggtggtggttctggcggcggcggctccggtggtggtggttctcaggttcagctgcagcagtctggacctgatctggtgaagcctggggcctcagtgaagatgtcctgcaaggcttctggacacactttcactgactgtgttataatctgggtgaaacagagagctggacagggccttgagtggattggacagatttatccagggactggtcgttcttactacaatgagattttcaagggcaaggccacactgactgcagacaaatcctccaacacagtccacattcaactcagcagcctgacatctgaggactctgcggtctatttctgtgccctatctactcttattcacgggacctggttttcttattggggccaagggactctggtcactgtctcttccggaggtggtggctccgaggtgcagctgctcgagtctggaggaggattggtgcagcctggagggtcattgaaactctcatgtgcagcctctggattcaccttcaatcgctacgccatgaactgggtccgccaggctccaggaaagggtttggaatgggttgctcgcataagaagtaaatataataattatgcaacatattatgccgattcagtgaaagggaggttcaccatctccagagatgattcaaaaaacactgcctatctacaaatgaacaacttgaaaactgaggacactgccgtgtactactgtgtgagacatgggaacttcggtaatagctacttatcctacttcgcttactggggccaagggactctggtcaccgtctcctcaggtggtggtggttctggcggcggcggctccggtggtggtggttctgagctcgttgtgactcaggaaccttcactcaccgtatcacctggtggaacagtcacactcacttgtggctcctcgactggggctgttacatctggctactacccaaactgggtccaacaaaaaccaggtcaggcaccccgtggtctaataggtgggactaagttcctcgcccccggtactcctgccagattctcaggctccctgcttggaggcaaggctgccctcaccctctcaggggtacagccagaggatgaggcagaatattactgtgctctatggtacagcaaccgctgggtgttcggtggaggaaccaaactgactgtccta

SEQ ID NO: 301 - protein, 500 aa, Artificial Sequence
  EGF-R 21-63 VL-VH x A2J VH-VL-P
DIVLTQSPASLPVSLGQRATISCRASQSVSSSTYSYIHWYQQKPGQPPKLLITYASNLESGVPARFSGSGSGTDFTLDIHPVEEDDSSTYYCQHSWEIPFTFGSGTKLEIKGGGGSGGGGSGGGGSQVQLQQSGPDLVKPGASVKMSCKASGHTFTDCVIIWVKQRAGQGLEWIGQIYPGTGRSYYNEIFKGKATLTADKSSNTVHIQLSSLTSEDSAVYFCALSTLIHGTWFSYWGQGTLVTVSSGGGGSEVQLLESGGGLVQPGGSLKLSCAASGFTFNVYAMNWVRQAPGKGLEWVARIRSKYNNYATYYADSVKKRFTISRDDSKNTAYLQMNNLKTEDTAVYYCVRHGNFGNSYLSWWAYWGQGTLVTVSSGGGGSGGGGSGGGGSELVVTQEPSLTVSPGGTVTLTCRSSTGAVTSGYYPNWVQQKPGQAPRGLIGATDMRPSGTPARFSGSLLGGKAALTLSGVQPEDEAEYYCALWYSNRWVFGGGTKLTVL

SEQ ID NO: 302 - DNA, 1500 bp, Artificial Sequence
  EGF-R 21-63 VL-VH x A2J VH-VL-P
gacattgtgctgacacagtctcctgcttccttacctgtgtctctggggcagagggccaccatctcatgcagggccagccaaagtgtcagttcatctacttatagttatatacactggtaccaacagaaaccaggacagccacccaaactcctcatcacgtatgcatccaacctagaatctggggtccctgccaggttcagtggcagtgggtctgggacagacttcaccctcgacatccatcctgtggaggaggatgattcttcaacatattactgtcagcacagttgggagattccatttacgttcggctcggggacaaagttggaaataaaaggtggtggtggttctggcggcggcggctccggtggtggtggttctcaggttcagctgcagcagtctggacctgatctggtgaagcctggggcctcagtgaagatgtcctgcaaggcttctggacacactttcactgactgtgttataatctgggtgaaacagagagctggacagggccttgagtggattggacagatttatccagggactggtcgttcttactacaatgagattttcaagggcaaggccacactgactgcagacaaatcctccaacacagtccacattcaactcagcagcctgacatctgaggactctgcggtctatttctgtgccctatctactcttattcacgggacctggttttcttattggggccaagggactctggtcactgtctcttccggaggtggtggctccgaggtgcagctgctcgagtctggaggaggattggtgcagcctggagggtcattgaaactctcatgtgcagcctctggattcaccttcaatgtctacgccatgaactgggtccgccaggctccaggaaagggtttggaatgggttgctcgcataagaagtaaatataataattatgcaacatattatgccgattcagtgaaaaagaggttcaccatctccagagatgattcaaaaaacactgcctatctacaaatgaacaacttgaaaactgaggacactgccgtgtactactgtgtgagacatgggaacttcggtaatagctacttatcctggtgggcttactggggccaagggactctggtcaccgtctcctcaggtggtggtggttctggcggcggcggctccggtggtggtggttctgagctcgttgtgactcaggaaccttcactcaccgtatcacctggtggaacagtcacactcacttgtcgctcctcgactggggctgttacatctggctactacccaaactgggtccaacaaaaaccaggtcaggcaccccgtggtctaataggtgccactgacatgaggccctctggtactcctgccagattctcaggctccctgcttggaggcaaggctgccctcaccctctcaggggtacagccagaggatgaggcagaatattactgtgctctatggtacagcaaccgctgggtgttcggtggaggaaccaaactgactgtccta

SEQ ID NO: 303 - protein, 500 aa, Artificial Sequence
  EGF-R 21-63 VL-VH x E1L VH-VL-P
DIVLTQSPASLPVSLGQRATISCRASQSVSSSTYSYIHWYQQKPGQPPKLLITYASNLESGVPARFSGSGSGTDFTLDIHPVEEDDSSTYYCQHSWEIPFTFGSGTKLEIKGGGGSGGGGSGGGGSQVQLQQSGPDLVKPGASVKMSCKASGHTFTDCVIIWVKQRAGQGLEWIGQIYPGTGRSYYNEIFKGKATLTADKSSNTVHIQLSSLTSEDSAVYFCALSTLIHGTWFSYWGQGTLVTVSSGGGGSEVQLLESGGGLVQPGGSLKLSCAASGFTFNKYAMNWVRQAPGKGLEWVARIRSKYNNYATYYADSVKSRFTISRDDSKNTAYLQMNNLKTEDTAVYYCVRHGNFGNSYTSYYAYWGQGTLVTVSSGGGGSGGGGSGGGGSELVVTQEPSLTVSPGGTVTLTCGSSTGAVTSGYYPNWVQQKPGQAPRGLIGGTKFLAPGTPARFSGSLLGGKAALTLSGVQPEDEAEYYCALWYSNRWVFGGGTKLTVL

SEQ ID NO: 304 - DNA, 1500 bp, Artificial Sequence
  EGF-R 21-63 VL-VH x E1L VH-VL-P
gacattgtgctgacacagtctcctgcttccttacctgtgtctctggggcagagggccaccatctcatgcagggccagccaaagtgtcagttcatctacttatagttatatacactggtaccaacagaaaccaggacagccacccaaactcctcatcacgtatgcatccaacctagaatctggggtccctgccaggttcagtggcagtgggtctgggacagacttcaccctcgacatccatcctgtggaggaggatgattcttcaacatattactgtcagcacagttgggagattccatttacgttcggctcggggacaaagttggaaataaaaggtggtggtggttctggcggcggcggctccggtggtggtggttctcaggttcagctgcagcagtctggacctgatctggtgaagcctggggcctcagtgaagatgtcctgcaaggcttctggacacactttcactgactgtgttataatctgggtgaaacagagagctggacagggccttgagtggattggacagatttatccagggactggtcgttcttactacaatgagattttcaagggcaaggccacactgactgcagacaaatcctccaacacagtccacattcaactcagcagcctgacatctgaggactctgcggtctatttctgtgccctatctactcttattcacgggacctggttttcttattggggccaagggactctggtcactgtctcttccggaggtggtggctccgaggtgcagctgctcgagtctggaggaggattggtgcagcctggagggtcattgaaactctcatgtgcagcctctggattcaccttcaataagtacgccatgaactgggtccgccaggctccaggaaagggtttggaatgggttgctcgcataagaagtaaatataataattatgcaacatattatgccgattcagtgaaatcgaggttcaccatctccagagatgattcaaaaaacactgcctatctacaaatgaacaacttgaaaactgaggacactgccgtgtactactgtgtgagacatgggaacttcggtaatagctacacatcctactacgcttactggggccaagggactctggtcaccgtctcctcaggtggtggtggttctggcggcggcggctccggtggtggtggttctgagctcgttgtgactcaggaaccttcactcaccgtatcacctggtggaacagtcacactcacttgtggctcctcgactggggctgttacatctggctactacccaaactgggtccaacaaaaaccaggtcaggcaccccgtggtctaataggtgggactaagttcctcgcccccggtactcctgccagattctcaggctccctgcttggaggcaaggctgccctcaccctctcaggggtacagccagaggatgaggcagaatattactgtgctctatggtacagcaaccgctgggtgttcggtggaggaaccaaactgactgtccta

SEQ ID NO: 305 - protein, 500 aa, Artificial Sequence
  EGF-R 21-63 VL-VH x E2M VH-VL-P
DIVLTQSPASLPVSLGQRATISCRASQSVSSSTYSYIHWYQQKPGQPPKLLITYASNLESGVPARFSGSGSGTDFTLDIHPVEEDDSSTYYCQHSWEIPFTFGSGTKLEIKGGGGSGGGGSGGGGSQVQLQQSGPDLVKPGASVKMSCKASGHTFTDCVIIWVKQRAGQGLEWIGQIYPGTGRSYYNEIFKGKATLTADKSSNTVHIQLSSLTSEDSAVYFCALSTLIHGTWFSYWGQGTLVTVSSGGGGSEVQLLESGGGLVQPGGSLKLSCAASGFTFNGYAMNWVRQAPGKGLEWVARIRSKYNNYATYYADSVKERFTISRDDSKNTAYLQMNNLKTEDTAVYYCVRHRNFGNSYLSWFAYWGQGTLVTVSSGGGGSGGGGSGGGGSELVVTQEPSLTVSPGGTVTLTCRSSTGAVTSGYYPNWVQQKPGQAPRGLIGATDMRPSGTPARFSGSLLGGKAALTLSGVQPEDEAEYYCALWYSNRWVFGGGTKLTVL

SEQ ID NO: 306 - DNA, 1500 bp, Artificial Sequence
  EGF-R 21-63 VL-VH x E2M VH-VL-P
gacattgtgctgacacagtctcctgcttccttacctgtgtctctggggcagagggccaccatctcatgcagggccagccaaagtgtcagttcatctacttatagttatatacactggtaccaacagaaaccaggacagccacccaaactcctcatcacgtatgcatccaacctagaatctggggtccctgccaggttcagtggcagtgggtctgggacagacttcaccctcgacatccatcctgtggaggaggatgattcttcaacatattactgtcagcacagttgggagattccatttacgttcggctcggggacaaagttggaaataaaaggtggtggtggttctggcggcggcggctccggtggtggtggttctcaggttcagctgcagcagtctggacctgatctggtgaagcctggggcctcagtgaagatgtcctgcaaggcttctggacacactttcactgactgtgttataatctgggtgaaacagagagctggacagggccttgagtggattggacagatttatccagggactggtcgttcttactacaatgagattttcaagggcaaggccacactgactgcagacaaatcctccaacacagtccacattcaactcagcagcctgacatctgaggactctgcggtctatttctgtgccctatctactcttattcacgggacctggttttcttattggggccaagggactctggtcactgtctcttccggaggtggtggctccgaggtgcagctgctcgagtctggaggaggattggtgcagcctggagggtcattgaaactctcatgtgcagcctctggattcaccttcaatggctacgccatgaactgggtccgccaggctccaggaaagggtttggaatgggttgctcgcataagaagtaaatataataattatgcaacatattatgccgattcagtgaaagagaggttcaccatctccagagatgattcaaaaaacactgcctatctacaaatgaacaacttgaaaactgaggacactgccgtgtactactgtgtgagacataggaacttcggtaatagctacttatcctggttcgcttactggggccaagggactctggtcaccgtctcctcaggtggtggtggttctggcggcggcggctccggtggtggtggttctgagctcgttgtgactcaggaaccttcactcaccgtatcacctggtggaacagtcacactcacttgtcgctcctcgactggggctgttacatctggctactacccaaactgggtccaacaaaaaccaggtcaggcaccccgtggtctaataggtgccactgacatgaggccctctggtactcctgccagattctcaggctccctgcttggaggcaaggctgccctcaccctctcaggggtacagccagaggatgaggcagaatattactgtgctctatggtacagcaaccgctgggtgttcggtggaggaaccaaactgactgtccta

SEQ ID NO: 307 - protein, 500 aa, Artificial Sequence
  EGF-R 21-63 VL-VH x F7O VH-VL-P
DIVLTQSPASLPVSLGQRATISCRASQSVSSSTYSYIHWYQQKPGQPPKLLITYASNLESGVPARFSGSGSGTDFTLDIHPVEEDDSSTYYCQHSWEIPFTFGSGTKLEIKGGGGSGGGGSGGGGSQVQLQQSGPDLVKPGASVKMSCKASGHTFTDCVIIWVKQRAGQGLEWIGQIYPGTGRSYYNEIFKGKATLTADKSSNTVHIQLSSLTSEDSAVYFCALSTLIHGTWFSYWGQGTLVTVSSGGGGSEVQLLESGGGLVQPGGSLKLSCAASGFTFNVYAMNWVRQAPGKGLEWVARIRSKYNNYATYYADSVKKRFTISRDDSKNTAYLQMNNLKTEDTAVYYCVRHGNFGNSYISWWAYWGQGTLVTVSSGGGGSGGGGSGGGGSELVVTQEPSLTVSPGGTVTLTCGSSTGAVTSGYYPNWVQQKPGQAPRGLIGGTKFLAPGTPARFSGSLLGGKAALTLSGVQPEDEAEYYCALWYSNRWVFGGGTKLTVL

SEQ ID NO: 308 - DNA, 1500 bp, Artificial Sequence
  EGF-R 21-63 VL-VH x F7O VH-VL-P
gacattgtgctgacacagtctcctgcttccttacctgtgtctctggggcagagggccaccatctcatgcagggccagccaaagtgtcagttcatctacttatagttatatacactggtaccaacagaaaccaggacagccacccaaactcctcatcacgtatgcatccaacctagaatctggggtccctgccaggttcagtggcagtgggtctgggacagacttcaccctcgacatccatcctgtggaggaggatgattcttcaacatattactgtcagcacagttgggagattccatttacgttcggctcggggacaaagttggaaataaaaggtggtggtggttctggcggcggcggctccggtggtggtggttctcaggttcagctgcagcagtctggacctgatctggtgaagcctggggcctcagtgaagatgtcctgcaaggcttctggacacactttcactgactgtgttataatctgggtgaaacagagagctggacagggccttgagtggattggacagatttatccagggactggtcgttcttactacaatgagattttcaagggcaaggccacactgactgcagacaaatcctccaacacagtccacattcaactcagcagcctgacatctgaggactctgcggtctatttctgtgccctatctactcttattcacgggacctggttttcttattggggccaagggactctggtcactgtctcttccggaggtggtggctccgaggtgcagctgctcgagtctggaggaggattggtgcagcctggagggtcattgaaactctcatgtgcagcctctggattcaccttcaatgtgtacgccatgaactgggtccgccaggctccaggaaagggtttggaatgggttgctcgcataagaagtaaatataataattatgcaacatattatgccgattcagtgaaaaagaggttcaccatctccagagatgattcaaaaaacactgcctatctacaaatgaacaacttgaaaactgaggacactgccgtgtactactgtgtgagacatgggaacttcggtaatagctacatatcctggtgggcttactggggccaagggactctggtcaccgtctcctcaggtggtggtggttctggcggcggcggctccggtggtggtggttctgagctcgttgtgactcaggaaccttcactcaccgtatcacctggtggaacagtcacactcacttgtggctcctcgactggggctgttacatctggctactacccaaactgggtccaacaaaaaccaggtcaggcaccccgtggtctaataggtgggactaagttcctcgcccccggtactcctgccagattctcaggctccctgcttggaggcaaggctgccctcaccctctcaggggtacagccagaggatgaggcagaatattactgtgctctatggtacagcaaccgctgggtgttcggtggaggaaccaaactgactgtccta

SEQ ID NO: 309 - protein, 500 aa, Artificial Sequence
  MCSP-G4 VH-VL x H2C VH-VL
QVQLVQSGAEVKRPGASMKVSCKASGYTFTNYYIHWVRQAPGQGLEWMGWINPNSGATNYAQKFQGRVTMTRDTSTSTVYMELSSLRSEDTAVYYCAKSWVSWFASWGQGTLVTVSSGGGGSGGGGSGGGGSDIVMTQSPDSLAVSLGERATINCKSSQSVLNSSNNRNYLAWYQQKPGQPPKLLIYWASTRESGVPDRFSGSGSGTDFTLTISGLQAEDVAVYYCQQHYSTPFTFGPGTKVDIKSGGGGSEVQLVESGGGLVQPGGSLKLSCAASGFTFNKYAMNWVRQAPGKGLEWVARIRSKYNNYATYYADSVKDRFTISRDDSKNTAYLQMNNLKTEDTAVYYCVRHGNFGNSYISYWAYWGQGTLVTVSSGGGGSGGGGSGGGGSQTVVTQEPSLTVSPGGTVTLTCGSSTGAVTSGYYPNWVQQKPGQAPRGLIGGTKFLAPGTPARFSGSLLGGKAALTLSGVQPEDEAEYYCALWYSNRWVFGGGTKLTVL

SEQ ID NO: 310 - DNA, 1500 bp, Artificial Sequence
  MCSP-G4 VH-VL x H2C VH-VL
caggtgcagctggtccagtctggggctgaggtgaagaggcctggggcctcaatgaaggtctcctgcaaggcttctgggtacaccttcaccaactactatatacactgggtgcgacaggcccctggacaaggtcttgagtggatgggttggatcaaccctaacagtggtgccacaaactatgcacagaagttccagggcagagtcaccatgaccagggacacgtccacgagcacagtctacatggagctgagcagcctgagatctgaggacacggccgtgtattactgtgcgaaatcctgggtctcctggtttgcttcctggggtcaaggaaccttggtcaccgtctcctcaggtggtggtggttctggcggcggcggctccggtggtggtggttctgatatcgtgatgacccagtctccagactccctggctgtgtctctgggcgagagggccaccatcaactgcaagtccagccagagtgttttaaacagctccaacaataggaactacttagcttggtaccagcagaaaccaggacagcctcctaagctgctcatttactgggcatctacccgggaatccggggtccctgaccgattcagtggcagcgggtctgggacagatttcactctcaccatcagtggcctgcaggctgaagatgtggcagtttattactgtcagcaacattatagtactccattcacttttggccctgggaccaaagtggatatcaaatccggaggtggtggatccgaggtgcagctggtcgagtctggaggaggattggtgcagcctggagggtcattgaaactctcatgtgcagcctctggattcaccttcaataagtacgccatgaactgggtccgccaggctccaggaaagggtttggaatgggttgctcgcataagaagtaaatataataattatgcaacatattatgccgattcagtgaaagacaggttcaccatctccagagatgattcaaaaaacactgcctatctacaaatgaacaacttgaaaactgaggacactgccgtgtactactgtgtgagacatgggaacttcggtaatagctacatatcctactgggcttactggggccaagggactctggtcaccgtctcctcaggtggtggtggttctggcggcggcggctccggtggtggtggttctcagactgttgtgactcaggaaccttcactcaccgtatcacctggtggaacagtcacactcacttgtggctcctcgactggggctgttacatctggctactacccaaactgggtccaacaaaaaccaggtcaggcaccccgtggtctaataggtgggactaagttcctcgcccccggtactcctgccagattctcaggctccctgcttggaggcaaggctgccctcaccctctcaggggtacagccagaggatgaggcagaatattactgtgctctatggtacagcaaccgctgggtgttcggtggaggaaccaaactgactgtccta

SEQ ID NO: 311 - protein, 500 aa, Artificial Sequence
  MCSP-G4 VH-VL x F12Q VH-VL
QVQLVQSGAEVKRPGASMKVSCKASGYTFTNYYIHWVRQAPGQGLEWMGWINPNSGATNYAQKFQGRVTMTRDTSTSTVYMELSSLRSEDTAVYYCAKSWVSWFASWGQGTLVTVSSGGGGSGGGGSGGGGSDIVMTQSPDSLAVSLGERATINCKSSQSVLNSSNNRNYLAWYQQKPGQPPKLLIYWASTRESGVPDRFSGSGSGTDFTLTISGLQAEDVAVYYCQQHYSTPFTFGPGTKVDIKSGGGGSEVQLVESGGGLVQPGGSLKLSCAASGFTFNSYAMNWVRQAPGKGLEWVARIRSKYNNYATYYADSVKGRFTISRDDSKNTAYLQMNNLKTEDTAVYYCVRHGNFGNSYVSWWAYWGQGTLVTVSSGGGGSGGGGSGGGGSQTVVTQEPSLTVSPGGTVTLTCGSSTGAVTSGNYPNWVQQKPGQAPRGLIGGTKFLAPGTPARFSGSLLGGKAALTLSGVQPEDEAEYYCVLWYSNRWVFGGGTKLTVL

SEQ ID NO: 312 - DNA, 1500 bp, Artificial Sequence
  MCSP-G4 VH-VL x F12Q VH-VL
caggtgcagctggtccagtctggggctgaggtgaagaggcctggggcctcaatgaaggtctcctgcaaggcttctgggtacaccttcaccaactactatatacactgggtgcgacaggcccctggacaaggtcttgagtggatgggttggatcaaccctaacagtggtgccacaaactatgcacagaagttccagggcagagtcaccatgaccagggacacgtccacgagcacagtctacatggagctgagcagcctgagatctgaggacacggccgtgtattactgtgcgaaatcctgggtctcctggtttgcttcctggggtcaaggaaccttggtcaccgtctcctcaggtggtggtggttctggcggcggcggctccggtggtggtggttctgatatcgtgatgacccagtctccagactccctggctgtgtctctgggcgagagggccaccatcaactgcaagtccagccagagtgttttaaacagctccaacaataggaactacttagcttggtaccagcagaaaccaggacagcctcctaagctgctcatttactgggcatctacccgggaatccggggtccctgaccgattcagtggcagcgggtctgggacagatttcactctcaccatcagtggcctgcaggctgaagatgtggcagtttattactgtcagcaacattatagtactccattcacttttggccctgggaccaaagtggatatcaaatccggaggtggtggatccgaggtgcagctggtcgagtctggaggaggattggtgcagcctggagggtcattgaaactctcatgtgcagcctctggattcaccttcaatagctacgccatgaactgggtccgccaggctccaggaaagggtttggaatgggttgctcgcataagaagtaaatataataattatgcaacatattatgccgattcagtgaaaggcaggttcaccatctccagagatgattcaaaaaacactgcctatctacaaatgaacaacttgaaaactgaggacactgccgtgtactactgtgtgagacatgggaacttcggtaatagctacgtttcctggtgggcttactggggccaagggactctggtcaccgtctcctcaggtggtggtggttctggcggcggcggctccggtggtggtggttctcagactgttgtgactcaggaaccttcactcaccgtatcacctggtggaacagtcacactcacttgtggctcctcgactggggctgttacatctggcaactacccaaactgggtccaacaaaaaccaggtcaggcaccccgtggtctaataggtgggactaagttcctcgcccccggtactcctgccagattctcaggctccctgcttggaggcaaggctgccctcaccctctcaggggtacagccagaggatgaggcagaatattactgtgttctatggtacagcaaccgctgggtgttcggtggaggaaccaaactgactgtccta

SEQ ID NO: 313 - protein, 500 aa, Artificial Sequence
  MCSP-G4 VH-VL x I2C VH-VL
QVQLVQSGAEVKRPGASMKVSCKASGYTFTNYYIHWVRQAPGQGLEWMGWINPNSGATNYAQKFQGRVTMTRDTSTSTVYMELSSLRSEDTAVYYCAKSWVSWFASWGQGTLVTVSSGGGGSGGGGSGGGGSDIVMTQSPDSLAVSLGERATINCKSSQSVLNSSNNRNYLAWYQQKPGQPPKLLIYWASTRESGVPDRFSGSGSGTDFTLTISGLQAEDVAVYYCQQHYSTPFTFGPGTKVDIKSGGGGSEVQLVESGGGLVQPGGSLKLSCAASGFTFNKYAMNWVRQAPGKGLEWVARIRSKYNNYATYYADSVKDRFTISRDDSKNTAYLQMNNLKTEDTAVYYCVRHGNFGNSYISYWAYWGQGTLVTVSSGGGGSGGGGSGGGGSQTVVTQEPSLTVSPGGTVTLTCGSSTGAVTSGNYPNWVQQKPGQAPRGLIGGTKFLAPGTPARFSGSLLGGKAALTLSGVQPEDEAEYYCVLWYSNRWVFGGGTKLTVL

SEQ ID NO: 314 - DNA, 1500 bp, Artificial Sequence
  MCSP-G4 VH-VL x I2C VH-VL
caggtgcagctggtccagtctggggctgaggtgaagaggcctggggcctcaatgaaggtctcctgcaaggcttctgggtacaccttcaccaactactatatacactgggtgcgacaggcccctggacaaggtcttgagtggatgggttggatcaaccctaacagtggtgccacaaactatgcacagaagttccagggcagagtcaccatgaccagggacacgtccacgagcacagtctacatggagctgagcagcctgagatctgaggacacggccgtgtattactgtgcgaaatcctgggtctcctggtttgcttcctggggtcaaggaaccttggtcaccgtctcctcaggtggtggtggttctggcggcggcggctccggtggtggtggttctgatatcgtgatgacccagtctccagactccctggctgtgtctctgggcgagagggccaccatcaactgcaagtccagccagagtgttttaaacagctccaacaataggaactacttagcttggtaccagcagaaaccaggacagcctcctaagctgctcatttactgggcatctacccgggaatccggggtccctgaccgattcagtggcagcgggtctgggacagatttcactctcaccatcagtggcctgcaggctgaagatgtggcagtttattactgtcagcaacattatagtactccattcacttttggccctgggaccaaagtggatatcaaatccggaggtggtggatccgaggtgcagctggtcgagtctggaggaggattggtgcagcctggagggtcattgaaactctcatgtgcagcctctggattcaccttcaataagtacgccatgaactgggtccgccaggctccaggaaagggtttggaatgggttgctcgcataagaagtaaatataataattatgcaacatattatgccgattcagtgaaagacaggttcaccatctccagagatgattcaaaaaacactgcctatctacaaatgaacaacttgaaaactgaggacactgccgtgtactactgtgtgagacatgggaacttcggtaatagctacatatcctactgggcttactggggccaagggactctggtcaccgtctcctcaggtggtggtggttctggcggcggcggctccggtggtggtggttctcagactgttgtgactcaggaaccttcactcaccgtatcacctggtggaacagtcacactcacttgtggctcctcgactggggctgttacatctggcaactacccaaactgggtccaacaaaaaccaggtcaggcaccccgtggtctaataggtgggactaagttcctcgcccccggtactcctgccagattctcaggctccctgcttggaggcaaggctgccctcaccctctcaggggtacagccagaggatgaggcagaatattactgtgttctatggtacagcaaccgctgggtgttcggtggaggaaccaaactgactgtccta

SEQ ID NO: 315 - protein, 500 aa, Artificial Sequence
  MCSP-G4 VH-VL-P x F6A VH-VL-P
QVQLVQSGAEVKRPGASMKVSCKASGYTFTNYYIHWVRQAPGQGLEWMGWINPNSGATNYAQKFQGRVTMTRDTSTSTVYMELSSLRSEDTAVYYCAKSWVSWFASWGQGTLVTVSSGGGGSGGGGSGGGGSELVMTQSPDSLAVSLGERATINCKSSQSVLNSSNNRNYLAWYQQKPGQPPKLLIYWASTRESGVPDRFSGSGSGTDFTLTISGLQAEDVAVYYCQQHYSTPFTFGPGTKVDIKSGGGGSEVQLLESGGGLVQPGGSLKLSCAASGFTFNIYAMNWVRQAPGKGLEWVARIRSKYNNYATYYADSVKSRFTISRDDSKNTAYLQMNNLKTEDTAVYYCVRHGNFGNSYVSFFAYWGQGTLVTVSSGGGGSGGGGSGGGGSELVVTQEPSLTVSPGGTVTLTCGSSTGAVTSGYYPNWVQQKPGQAPRGLIGGTKFLAPGTPARFSGSLLGGKAALTLSGVQPEDEAEYYCALWYSNRWVFGGGTKLTVL

SEQ ID NO: 316 - DNA, 1500 bp, Artificial Sequence
  MCSP-G4 VH-VL-P x F6A VH-VL-P
caggtgcagctggtccagtctggggctgaggtgaagaggcctggggcctcaatgaaggtctcctgcaaggcttctgggtacaccttcaccaactactatatacactgggtgcgacaggcccctggacaaggtcttgagtggatgggttggatcaaccctaacagtggtgccacaaactatgcacagaagttccagggcagagtcaccatgaccagggacacgtccacgagcacagtctacatggagctgagcagcctgagatctgaggacacggccgtgtattactgtgcgaaatcctgggtctcctggtttgcttcctggggtcaaggaaccttggtcaccgtctcctcaggtggtggtggttctggcggcggcggctccggtggtggtggttctgagctcgtgatgacccagtctccagactccctggctgtgtctctgggcgagagggccaccatcaactgcaagtccagccagagtgttttaaacagctccaacaataggaactacttagcttggtaccagcagaaaccaggacagcctcctaagctgctcatttactgggcatctacccgggaatccggggtccctgaccgattcagtggcagcgggtctgggacagatttcactctcaccatcagtggcctgcaggctgaagatgtggcagtttattactgtcagcaacattatagtactccattcacttttggccctgggaccaaagtggatatcaaatccggaggtggtggatccgaggtgcagctgctcgagtctggaggaggattggtgcagcctggagggtcattgaaactctcatgtgcagcctctggattcaccttcaatatctacgccatgaactgggtccgccaggctccaggaaagggtttggaatgggttgctcgcataagaagtaaatataataattatgcaacatattatgccgattcagtgaaaagcaggttcaccatctccagagatgattcaaaaaacactgcctatctacaaatgaacaacttgaaaactgaggacactgccgtgtactactgtgtgagacatgggaacttcggtaatagctacgtatccttcttcgcttactggggccaagggactctggtcaccgtctcctcaggtggtggtggttctggcggcggcggctccggtggtggtggttctgagctcgttgtgactcaggaaccttcactcaccgtatcacctggtggaacagtcacactcacttgtggctcctcgactggggctgttacatctggctactacccaaactgggtccaacaaaaaccaggtcaggcaccccgtggtctaataggtgggactaagttcctcgcccccggtactcctgccagattctcaggctccctgcttggaggcaaggctgccctcaccctctcaggggtacagccagaggatgaggcagaatattactgtgctctatggtacagcaaccgctgggtgttcggtggaggaaccaaactgactgtccta

SEQ ID NO: 317 - protein, 500 aa, Artificial Sequence
  MCSP-G4 VH-VL-P x H2C VH-VL-P
QVQLVQSGAEVKRPGASMKVSCKASGYTFTNYYIHWVRQAPGQGLEWMGWINPNSGATNYAQKFQGRVTMTRDTSTSTVYMELSSLRSEDTAVYYCAKSWVSWFASWGQGTLVTVSSGGGGSGGGGSGGGGSELVMTQSPDSLAVSLGERATINCKSSQSVLNSSNNRNYLAWYQQKPGQPPKLLIYWASTRESGVPDRFSGSGSGTDFTLTISGLQAEDVAVYYCQQHYSTPFTFGPGTKVDIKSGGGGSEVQLLESGGGLVQPGGSLKLSCAASGFTFNKYAMNWVRQAPGKGLEWVARIRSKYNNYATYYADSVKDRFTISRDDSKNTAYLQMNNLKTEDTAVYYCVRHGNFGNSYISYWAYWGQGTLVTVSSGGGGSGGGGSGGGGSELVVTQEPSLTVSPGGTVTLTCGSSTGAVTSGYYPNWVQQKPGQAPRGLIGGTKFLAPGTPARFSGSLLGGKAALTLSGVQPEDEAEYYCALWYSNRWVFGGGTKLTVL

SEQ ID NO: 318 - DNA, 1500 bp, Artificial Sequence
  MCSP-G4 VH-VL-P x H2C VH-VL-P
caggtgcagctggtccagtctggggctgaggtgaagaggcctggggcctcaatgaaggtctcctgcaaggcttctgggtacaccttcaccaactactatatacactgggtgcgacaggcccctggacaaggtcttgagtggatgggttggatcaaccctaacagtggtgccacaaactatgcacagaagttccagggcagagtcaccatgaccagggacacgtccacgagcacagtctacatggagctgagcagcctgagatctgaggacacggccgtgtattactgtgcgaaatcctgggtctcctggtttgcttcctggggtcaaggaaccttggtcaccgtctcctcaggtggtggtggttctggcggcggcggctccggtggtggtggttctgagctcgtgatgacccagtctccagactccctggctgtgtctctgggcgagagggccaccatcaactgcaagtccagccagagtgttttaaacagctccaacaataggaactacttagcttggtaccagcagaaaccaggacagcctcctaagctgctcatttactgggcatctacccgggaatccggggtccctgaccgattcagtggcagcgggtctgggacagatttcactctcaccatcagtggcctgcaggctgaagatgtggcagtttattactgtcagcaacattatagtactccattcacttttggccctgggaccaaagtggatatcaaatccggaggtggtggatccgaggtgcagctgctcgagtctggaggaggattggtgcagcctggagggtcattgaaactctcatgtgcagcctctggattcaccttcaataagtacgccatgaactgggtccgccaggctccaggaaagggtttggaatgggttgctcgcataagaagtaaatataataattatgcaacatattatgccgattcagtgaaagacaggttcaccatctccagagatgattcaaaaaacactgcctatctacaaatgaacaacttgaaaactgaggacactgccgtgtactactgtgtgagacatgggaacttcggtaatagctacatatcctactgggcttactggggccaagggactctggtcaccgtctcctcaggtggtggtggttctggcggcggcggctccggtggtggtggttctgagctcgttgtgactcaggaaccttcactcaccgtatcacctggtggaacagtcacactcacttgtggctcctcgactggggctgttacatctggctactacccaaactgggtccaacaaaaaccaggtcaggcaccccgtggtctaataggtgggactaagttcctcgcccccggtactcctgccagattctcaggctccctgcttggaggcaaggctgccctcaccctctcaggggtacagccagaggatgaggcagaatattactgtgctctatggtacagcaaccgctgggtgttcggtggaggaaccaaactgactgtccta

SEQ ID NO: 319 - protein, 500 aa, Artificial Sequence
  MCSP-G4 VH-VL-P x H1E VH-VL-P
QVQLVQSGAEVKRPGASMKVSCKASGYTFTNYYIHWVRQAPGQGLEWMGWINPNSGATNYAQKFQGRVTMTRDTSTSTVYMELSSLRSEDTAVYYCAKSWVSWFASWGQGTLVTVSSGGGGSGGGGSGGGGSELVMTQSPDSLAVSLGERATINCKSSQSVLNSSNNRNYLAWYQQKPGQPPKLLIYWASTRESGVPDRFSGSGSGTDFTLTISGLQAEDVAVYYCQQHYSTPFTFGPGTKVDIKSGGGGSEVQLLESGGGLEQPGGSLKLSCAASGFTFNSYAMNWVRQAPGKGLEWVARIRSKYNNYATYYADSVKGRFTISRDDSKNTAYLQMNNLKTEDTAVYYCVRHGNFGNSYLSFWAYWGQGTLVTVSSGGGGSGGGGSGGGGSELVVTQEPSLTVSPGGTVTLTCGSSTGAVTSGYYPNWVQQKPGQAPRGLIGGTKFLAPGTPARFSGSLLGGKAALTLSGVQPEDEAEYYCALWYSNRWVFGGGTKLTVL

SEQ ID NO: 320 - DNA, 1500 bp, Artificial Sequence
  MCSP-G4 VH-VL-P x H1E VH-VL-P
caggtgcagctggtccagtctggggctgaggtgaagaggcctggggcctcaatgaaggtctcctgcaaggcttctgggtacaccttcaccaactactatatacactgggtgcgacaggcccctggacaaggtcttgagtggatgggttggatcaaccctaacagtggtgccacaaactatgcacagaagttccagggcagagtcaccatgaccagggacacgtccacgagcacagtctacatggagctgagcagcctgagatctgaggacacggccgtgtattactgtgcgaaatcctgggtctcctggtttgcttcctggggtcaaggaaccttggtcaccgtctcctcaggtggtggtggttctggcggcggcggctccggtggtggtggttctgagctcgtgatgacccagtctccagactccctggctgtgtctctgggcgagagggccaccatcaactgcaagtccagccagagtgttttaaacagctccaacaataggaactacttagcttggtaccagcagaaaccaggacagcctcctaagctgctcatttactgggcatctacccgggaatccggggtccctgaccgattcagtggcagcgggtctgggacagatttcactctcaccatcagtggcctgcaggctgaagatgtggcagtttattactgtcagcaacattatagtactccattcacttttggccctgggaccaaagtggatatcaaatccggaggtggtggatccgaggtgcagctgctcgagtctggaggaggattggagcagcctggagggtcattgaaactctcatgtgcagcctctggattcaccttcaattcgtacgccatgaactgggtccgccaggctccaggaaagggtttggaatgggttgctcgcataagaagtaaatataataattatgcaacatattatgccgattcagtgaaagggaggttcaccatctccagagatgattcaaaaaacactgcctatctacaaatgaacaacttgaaaactgaggacactgccgtgtactactgtgtgagacatgggaacttcggtaatagctacctatccttctgggcttactggggccaagggactctggtcaccgtctcctcaggtggtggtggttctggcggcggcggctccggtggtggtggttctgagctcgttgtgactcaggaaccttcactcaccgtatcacctggtggaacagtcacactcacttgtggctcctcgactggggctgttacatctggctactacccaaactgggtccaacaaaaaccaggtcaggcaccccgtggtctaataggtgggactaagttcctcgcccccggtactcctgccagattctcaggctccctgcttggaggcaaggctgccctcaccctctcaggggtacagccagaggatgaggcagaatattactgtgctctatggtacagcaaccgctgggtgttcggtggaggaaccaaactgactgtccta

SEQ ID NO: 321 - protein, 500 aa, Artificial Sequence
  MCSP-G4 VH-VL-P x G4H VH-VL-P
QVQLVQSGAEVKRPGASMKVSCKASGYTFTNYYIHWVRQAPGQGLEWMGWINPNSGATNYAQKFQGRVTMTRDTSTSTVYMELSSLRSEDTAVYYCAKSWVSWFASWGQGTLVTVSSGGGGSGGGGSGGGGSELVMTQSPDSLAVSLGERATINCKSSQSVLNSSNNRNYLAWYQQKPGQPPKLLIYWASTRESGVPDRFSGSGSGTDFTLTISGLQAEDVAVYYCQQHYSTPFTFGPGTKVDIKSGGGGSEVQLLESGGGLVQPGGSLKLSCAASGFTFNRYAMNWVRQAPGKGLEWVARIRSKYNNYATYYADSVKGRFTISRDDSKNTAYLQMNNLKTEDTAVYYCVRHGNFGNSYLSYFAYWGQGTLVTVSSGGGGSGGGGSGGGGSELVVTQEPSLTVSPGGTVTLTCGSSTGAVTSGYYPNWVQQKPGQAPRGLIGGTKFLAPGTPARFSGSLLGGKAALTLSGVQPEDEAEYYCALWYSNRWVFGGGTKLTVL

SEQ ID NO: 322 - DNA, 1500 bp, Artificial Sequence
  MCSP-G4 VH-VL-P x G4H VH-VL-P
caggtgcagctggtccagtctggggctgaggtgaagaggcctggggcctcaatgaaggtctcctgcaaggcttctgggtacaccttcaccaactactatatacactgggtgcgacaggcccctggacaaggtcttgagtggatgggttggatcaaccctaacagtggtgccacaaactatgcacagaagttccagggcagagtcaccatgaccagggacacgtccacgagcacagtctacatggagctgagcagcctgagatctgaggacacggccgtgtattactgtgcgaaatcctgggtctcctggtttgcttcctggggtcaaggaaccttggtcaccgtctcctcaggtggtggtggttctggcggcggcggctccggtggtggtggttctgagctcgtgatgacccagtctccagactccctggctgtgtctctgggcgagagggccaccatcaactgcaagtccagccagagtgttttaaacagctccaacaataggaactacttagcttggtaccagcagaaaccaggacagcctcctaagctgctcatttactgggcatctacccgggaatccggggtccctgaccgattcagtggcagcgggtctgggacagatttcactctcaccatcagtggcctgcaggctgaagatgtggcagtttattactgtcagcaacattatagtactccattcacttttggccctgggaccaaagtggatatcaaatccggaggtggtggatccgaggtgcagctgctcgagtctggaggaggattggtgcagcctggagggtcattgaaactctcatgtgcagcctctggattcaccttcaatcgctacgccatgaactgggtccgccaggctccaggaaagggtttggaatgggttgctcgcataagaagtaaatataataattatgcaacatattatgccgattcagtgaaagggaggttcaccatctccagagatgattcaaaaaacactgcctatctacaaatgaacaacttgaaaactgaggacactgccgtgtactactgtgtgagacatgggaacttcggtaatagctacttatcctacttcgcttactggggccaagggactctggtcaccgtctcctcaggtggtggtggttctggcggcggcggctccggtggtggtggttctgagctcgttgtgactcaggaaccttcactcaccgtatcacctggtggaacagtcacactcacttgtggctcctcgactggggctgttacatctggctactacccaaactgggtccaacaaaaaccaggtcaggcaccccgtggtctaataggtgggactaagttcctcgcccccggtactcctgccagattctcaggctccctgcttggaggcaaggctgccctcaccctctcaggggtacagccagaggatgaggcagaatattactgtgctctatggtacagcaaccgctgggtgttcggtggaggaaccaaactgactgtccta

SEQ ID NO: 323 - protein, 500 aa, Artificial Sequence
  MCSP-G4 VH-VL-P x A2J VH-VL-P
QVQLVQSGAEVKRPGASMKVSCKASGYTFTNYYIHWVRQAPGQGLEWMGWINPNSGATNYAQKFQGRVTMTRDTSTSTVYMELSSLRSEDTAVYYCAKSWVSWFASWGQGTLVTVSSGGGGSGGGGSGGGGSELVMTQSPDSLAVSLGERATINCKSSQSVLNSSNNRNYLAWYQQKPGQPPKLLIYWASTRESGVPDRFSGSGSGTDFTLTISGLQAEDVAVYYCQQHYSTPFTFGPGTKVDIKSGGGGSEVQLLESGGGLVQPGGSLKLSCAASGFTFNVYAMNWVRQAPGKGLEWVARIRSKYNNYATYYADSVKKRFTISRDDSKNTAYLQMNNLKTEDTAVYYCVRHGNFGNSYLSWWAYWGQGTLVTVSSGGGGSGGGGSGGGGSELVVTQEPSLTVSPGGTVTLTCRSSTGAVTSGYYPNWVQQKPGQAPRGLIGATDMRPSGTPARFSGSLLGGKAALTLSGVQPEDEAEYYCALWYSNRWVFGGGTKLTVL

SEQ ID NO: 324 - DNA, 1500 bp, Artificial Sequence
  MCSP-G4 VH-VL-P x A2J VH-VL-P
caggtgcagctggtccagtctggggctgaggtgaagaggcctggggcctcaatgaaggtctcctgcaaggcttctgggtacaccttcaccaactactatatacactgggtgcgacaggcccctggacaaggtcttgagtggatgggttggatcaaccctaacagtggtgccacaaactatgcacagaagttccagggcagagtcaccatgaccagggacacgtccacgagcacagtctacatggagctgagcagcctgagatctgaggacacggccgtgtattactgtgcgaaatcctgggtctcctggtttgcttcctggggtcaaggaaccttggtcaccgtctcctcaggtggtggtggttctggcggcggcggctccggtggtggtggttctgagctcgtgatgacccagtctccagactccctggctgtgtctctgggcgagagggccaccatcaactgcaagtccagccagagtgttttaaacagctccaacaataggaactacttagcttggtaccagcagaaaccaggacagcctcctaagctgctcatttactgggcatctacccgggaatccggggtccctgaccgattcagtggcagcgggtctgggacagatttcactctcaccatcagtggcctgcaggctgaagatgtggcagtttattactgtcagcaacattatagtactccattcacttttggccctgggaccaaagtggatatcaaatccggaggtggtggatccgaggtgcagctgctcgagtctggaggaggattggtgcagcctggagggtcattgaaactctcatgtgcagcctctggattcaccttcaatgtctacgccatgaactgggtccgccaggctccaggaaagggtttggaatgggttgctcgcataagaagtaaatataataattatgcaacatattatgccgattcagtgaaaaagaggttcaccatctccagagatgattcaaaaaacactgcctatctacaaatgaacaacttgaaaactgaggacactgccgtgtactactgtgtgagacatgggaacttcggtaatagctacttatcctggtgggcttactggggccaagggactctggtcaccgtctcctcaggtggtggtggttctggcggcggcggctccggtggtggtggttctgagctcgttgtgactcaggaaccttcactcaccgtatcacctggtggaacagtcacactcacttgtcgctcctcgactggggctgttacatctggctactacccaaactgggtccaacaaaaaccaggtcaggcaccccgtggtctaataggtgccactgacatgaggccctctggtactcctgccagattctcaggctccctgcttggaggcaaggctgccctcaccctctcaggggtacagccagaggatgaggcagaatattactgtgctctatggtacagcaaccgctgggtgttcggtggaggaaccaaactgactgtccta

SEQ ID NO: 325 - protein, 500 aa, Artificial Sequence
  MCSP-G4 VH-VL-P x E1L VH-VL-P
QVQLVQSGAEVKRPGASMKVSCKASGYTFTNYYIHWVRQAPGQGLEWMGWINPNSGATNYAQKFQGRVTMTRDTSTSTVYMELSSLRSEDTAVYYCAKSWVSWFASWGQGTLVTVSSGGGGSGGGGSGGGGSELVMTQSPDSLAVSLGERATINCKSSQSVLNSSNNRNYLAWYQQKPGQPPKLLIYWASTRESGVPDRFSGSGSGTDFTLTISGLQAEDVAVYYCQQHYSTPFTFGPGTKVDIKSGGGGSEVQLLESGGGLVQPGGSLKLSCAASGFTFNKYAMNWVRQAPGKGLEWVARIRSKYNNYATYYADSVKSRFTISRDDSKNTAYLQMNNLKTEDTAVYYCVRHGNFGNSYTSYYAYWGQGTLVTVSSGGGGSGGGGSGGGGSELVVTQEPSLTVSPGGTVTLTCGSSTGAVTSGYYPNWVQQKPGQAPRGLIGGTKFLAPGTPARFSGSLLGGKAALTLSGVQPEDEAEYYCALWYSNRWVFGGGTKLTVL

SEQ ID NO: 326 - DNA, 1500 bp, Artificial Sequence
  MCSP-G4 VH-VL-P x E1L VH-VL-P
caggtgcagctggtccagtctggggctgaggtgaagaggcctggggcctcaatgaaggtctcctgcaaggcttctgggtacaccttcaccaactactatatacactgggtgcgacaggcccctggacaaggtcttgagtggatgggttggatcaaccctaacagtggtgccacaaactatgcacagaagttccagggcagagtcaccatgaccagggacacgtccacgagcacagtctacatggagctgagcagcctgagatctgaggacacggccgtgtattactgtgcgaaatcctgggtctcctggtttgcttcctggggtcaaggaaccttggtcaccgtctcctcaggtggtggtggttctggcggcggcggctccggtggtggtggttctgagctcgtgatgacccagtctccagactccctggctgtgtctctgggcgagagggccaccatcaactgcaagtccagccagagtgttttaaacagctccaacaataggaactacttagcttggtaccagcagaaaccaggacagcctcctaagctgctcatttactgggcatctacccgggaatccggggtccctgaccgattcagtggcagcgggtctgggacagatttcactctcaccatcagtggcctgcaggctgaagatgtggcagtttattactgtcagcaacattatagtactccattcacttttggccctgggaccaaagtggatatcaaatccggaggtggtggatccgaggtgcagctgctcgagtctggaggaggattggtgcagcctggagggtcattgaaactctcatgtgcagcctctggattcaccttcaataagtacgccatgaactgggtccgccaggctccaggaaagggtttggaatgggttgctcgcataagaagtaaatataataattatgcaacatattatgccgattcagtgaaatcgaggttcaccatctccagagatgattcaaaaaacactgcctatctacaaatgaacaacttgaaaactgaggacactgccgtgtactactgtgtgagacatgggaacttcggtaatagctacacatcctactacgcttactggggccaagggactctggtcaccgtctcctcaggtggtggtggttctggcggcggcggctccggtggtggtggttctgagctcgttgtgactcaggaaccttcactcaccgtatcacctggtggaacagtcacactcacttgtggctcctcgactggggctgttacatctggctactacccaaactgggtccaacaaaaaccaggtcaggcaccccgtggtctaataggtgggactaagttcctcgcccccggtactcctgccagattctcaggctccctgcttggaggcaaggctgccctcaccctctcaggggtacagccagaggatgaggcagaatattactgtgctctatggtacagcaaccgctgggtgttcggtggaggaaccaaactgactgtccta

SEQ ID NO: 327 - protein, 500 aa, Artificial Sequence
  MCSP-G4 VH-VL-P x E2M VH-VL-P
QVQLVQSGAEVKRPGASMKVSCKASGYTFTNYYIHWVRQAPGQGLEWMGWINPNSGATNYAQKFQGRVTMTRDTSTSTVYMELSSLRSEDTAVYYCAKSWVSWFASWGQGTLVTVSSGGGGSGGGGSGGGGSELVMTQSPDSLAVSLGERATINCKSSQSVLNSSNNRNYLAWYQQKPGQPPKLLIYWASTRESGVPDRFSGSGSGTDFTLTISGLQAEDVAVYYCQQHYSTPFTFGPGTKVDIKSGGGGSEVQLLESGGGLVQPGGSLKLSCAASGFTFNGYAMNWVRQAPGKGLEWVARIRSKYNNYATYYADSVKERFTISRDDSKNTAYLQMNNLKTEDTAVYYCVRHRNFGNSYLSWFAYWGQGTLVTVSSGGGGSGGGGSGGGGSELVVTQEPSLTVSPGGTVTLTCRSSTGAVTSGYYPNWVQQKPGQAPRGLIGATDMRPSGTPARFSGSLLGGKAALTLSGVQPEDEAEYYCALWYSNRWVFGGGTKLTVL

SEQ ID NO: 328 - DNA, 1500 bp, Artificial Sequence
  MCSP-G4 VH-VL-P x E2M VH-VL-P
caggtgcagctggtccagtctggggctgaggtgaagaggcctggggcctcaatgaaggtctcctgcaaggcttctgggtacaccttcaccaactactatatacactgggtgcgacaggcccctggacaaggtcttgagtggatgggttggatcaaccctaacagtggtgccacaaactatgcacagaagttccagggcagagtcaccatgaccagggacacgtccacgagcacagtctacatggagctgagcagcctgagatctgaggacacggccgtgtattactgtgcgaaatcctgggtctcctggtttgcttcctggggtcaaggaaccttggtcaccgtctcctcaggtggtggtggttctggcggcggcggctccggtggtggtggttctgagctcgtgatgacccagtctccagactccctggctgtgtctctgggcgagagggccaccatcaactgcaagtccagccagagtgttttaaacagctccaacaataggaactacttagcttggtaccagcagaaaccaggacagcctcctaagctgctcatttactgggcatctacccgggaatccggggtccctgaccgattcagtggcagcgggtctgggacagatttcactctcaccatcagtggcctgcaggctgaagatgtggcagtttattactgtcagcaacattatagtactccattcacttttggccctgggaccaaagtggatatcaaatccggaggtggtggatccgaggtgcagctgctcgagtctggaggaggattggtgcagcctggagggtcattgaaactctcatgtgcagcctctggattcaccttcaatggctacgccatgaactgggtccgccaggctccaggaaagggtttggaatgggttgctcgcataagaagtaaatataataattatgcaacatattatgccgattcagtgaaagagaggttcaccatctccagagatgattcaaaaaacactgcctatctacaaatgaacaacttgaaaactgaggacactgccgtgtactactgtgtgagacataggaacttcggtaatagctacttatcctggttcgcttactggggccaagggactctggtcaccgtctcctcaggtggtggtggttctggcggcggcggctccggtggtggtggttctgagctcgttgtgactcaggaaccttcactcaccgtatcacctggtggaacagtcacactcacttgtcgctcctcgactggggctgttacatctggctactacccaaactgggtccaacaaaaaccaggtcaggcaccccgtggtctaataggtgccactgacatgaggccctctggtactcctgccagattctcaggctccctgcttggaggcaaggctgccctcaccctctcaggggtacagccagaggatgaggcagaatattactgtgctctatggtacagcaaccgctgggtgttcggtggaggaaccaaactgactgtccta

SEQ ID NO: 329 - protein, 500 aa, Artificial Sequence
  MCSP-G4 VH-VL-P x F7O VH-VL-P
QVQLVQSGAEVKRPGASMKVSCKASGYTFTNYYIHWVRQAPGQGLEWMGWINPNSGATNYAQKFQGRVTMTRDTSTSTVYMELSSLRSEDTAVYYCAKSWVSWFASWGQGTLVTVSSGGGGSGGGGSGGGGSELVMTQSPDSLAVSLGERATINCKSSQSVLNSSNNRNYLAWYQQKPGQPPKLLIYWASTRESGVPDRFSGSGSGTDFTLTISGLQAEDVAVYYCQQHYSTPFTFGPGTKVDIKSGGGGSEVQLLESGGGLVQPGGSLKLSCAASGFTFNVYAMNWVRQAPGKGLEWVARIRSKYNNYATYYADSVKKRFTISRDDSKNTAYLQMNNLKTEDTAVYYCVRHGNFGNSYISWWAYWGQGTLVTVSSGGGGSGGGGSGGGGSELVVTQEPSLTVSPGGTVTLTCGSSTGAVTSGYYPNWVQQKPGQAPRGLIGGTKFLAPGTPARFSGSLLGGKAALTLSGVQPEDEAEYYCALWYSNRWVFGGGTKLTVL

SEQ ID NO: 330 - DNA, 1500 bp, Artificial Sequence
  MCSP-G4 VH-VL-P x F7O VH-VL-P
caggtgcagctggtccagtctggggctgaggtgaagaggcctggggcctcaatgaaggtctcctgcaaggcttctgggtacaccttcaccaactactatatacactgggtgcgacaggcccctggacaaggtcttgagtggatgggttggatcaaccctaacagtggtgccacaaactatgcacagaagttccagggcagagtcaccatgaccagggacacgtccacgagcacagtctacatggagctgagcagcctgagatctgaggacacggccgtgtattactgtgcgaaatcctgggtctcctggtttgcttcctggggtcaaggaaccttggtcaccgtctcctcaggtggtggtggttctggcggcggcggctccggtggtggtggttctgagctcgtgatgacccagtctccagactccctggctgtgtctctgggcgagagggccaccatcaactgcaagtccagccagagtgttttaaacagctccaacaataggaactacttagcttggtaccagcagaaaccaggacagcctcctaagctgctcatttactgggcatctacccgggaatccggggtccctgaccgattcagtggcagcgggtctgggacagatttcactctcaccatcagtggcctgcaggctgaagatgtggcagtttattactgtcagcaacattatagtactccattcacttttggccctgggaccaaagtggatatcaaatccggaggtggtggatccgaggtgcagctgctcgagtctggaggaggattggtgcagcctggagggtcattgaaactctcatgtgcagcctctggattcaccttcaatgtgtacgccatgaactgggtccgccaggctccaggaaagggtttggaatgggttgctcgcataagaagtaaatataataattatgcaacatattatgccgattcagtgaaaaagaggttcaccatctccagagatgattcaaaaaacactgcctatctacaaatgaacaacttgaaaactgaggacactgccgtgtactactgtgtgagacatgggaacttcggtaatagctacatatcctggtgggcttactggggccaagggactctggtcaccgtctcctcaggtggtggtggttctggcggcggcggctccggtggtggtggttctgagctcgttgtgactcaggaaccttcactcaccgtatcacctggtggaacagtcacactcacttgtggctcctcgactggggctgttacatctggctactacccaaactgggtccaacaaaaaccaggtcaggcaccccgtggtctaataggtgggactaagttcctcgcccccggtactcctgccagattctcaggctccctgcttggaggcaaggctgccctcaccctctcaggggtacagccagaggatgaggcagaatattactgtgctctatggtacagcaaccgctgggtgttcggtggaggaaccaaactgactgtccta

SEQ ID NO: 331 - protein, 500 aa, Artificial Sequence
  MCSP-G4 VH-VL-P x F12Q VH-VL
QVQLVQSGAEVKRPGASMKVSCKASGYTFTNYYIHWVRQAPGQGLEWMGWINPNSGATNYAQKFQGRVTMTRDTSTSTVYMELSSLRSEDTAVYYCAKSWVSWFASWGQGTLVTVSSGGGGSGGGGSGGGGSELVMTQSPDSLAVSLGERATINCKSSQSVLNSSNNRNYLAWYQQKPGQPPKLLIYWASTRESGVPDRFSGSGSGTDFTLTISGLQAEDVAVYYCQQHYSTPFTFGPGTKVDIKSGGGGSEVQLVESGGGLVQPGGSLKLSCAASGFTFNSYAMNWVRQAPGKGLEWVARIRSKYNNYATYYADSVKGRFTISRDDSKNTAYLQMNNLKTEDTAVYYCVRHGNFGNSYVSWWAYWGQGTLVTVSSGGGGSGGGGSGGGGSQTVVTQEPSLTVSPGGTVTLTCGSSTGAVTSGNYPNWVQQKPGQAPRGLIGGTKFLAPGTPARFSGSLLGGKAALTLSGVQPEDEAEYYCVLWYSNRWVFGGGTKLTVL

SEQ ID NO: 332 - DNA, 1500 bp, Artificial Sequence
  MCSP-G4 VH-VL-P x F12Q VH-VL
caggtgcagctggtccagtctggggctgaggtgaagaggcctggggcctcaatgaaggtctcctgcaaggcttctgggtacaccttcaccaactactatatacactgggtgcgacaggcccctggacaaggtcttgagtggatgggttggatcaaccctaacagtggtgccacaaactatgcacagaagttccagggcagagtcaccatgaccagggacacgtccacgagcacagtctacatggagctgagcagcctgagatctgaggacacggccgtgtattactgtgcgaaatcctgggtctcctggtttgcttcctggggtcaaggaaccttggtcaccgtctcctcaggtggtggtggttctggcggcggcggctccggtggtggtggttctgagctcgtgatgacccagtctccagactccctggctgtgtctctgggcgagagggccaccatcaactgcaagtccagccagagtgttttaaacagctccaacaataggaactacttagcttggtaccagcagaaaccaggacagcctcctaagctgctcatttactgggcatctacccgggaatccggggtccctgaccgattcagtggcagcgggtctgggacagatttcactctcaccatcagtggcctgcaggctgaagatgtggcagtttattactgtcagcaacattatagtactccattcacttttggccctgggaccaaagtggatatcaaatccggaggtggtggatccgaggtgcagctggtcgagtctggaggaggattggtgcagcctggagggtcattgaaactctcatgtgcagcctctggattcaccttcaatagctacgccatgaactgggtccgccaggctccaggaaagggtttggaatgggttgctcgcataagaagtaaatataataattatgcaacatattatgccgattcagtgaaaggcaggttcaccatctccagagatgattcaaaaaacactgcctatctacaaatgaacaacttgaaaactgaggacactgccgtgtactactgtgtgagacatgggaacttcggtaatagctacgtttcctggtgggcttactggggccaagggactctggtcaccgtctcctcaggtggtggtggttctggcggcggcggctccggtggtggtggttctcagactgttgtgactcaggaaccttcactcaccgtatcacctggtggaacagtcacactcacttgtggctcctcgactggggctgttacatctggcaactacccaaactgggtccaacaaaaaccaggtcaggcaccccgtggtctaataggtgggactaagttcctcgcccccggtactcctgccagattctcaggctccctgcttggaggcaaggctgccctcaccctctcaggggtacagccagaggatgaggcagaatattactgtgttctatggtacagcaaccgctgggtgttcggtggaggaaccaaactgactgtccta

SEQ ID NO: 333 - protein, 500 aa, Artificial Sequence
  MCSP-G4 VH-VL-P x I2C VH-VL
QVQLVQSGAEVKRPGASMKVSCKASGYTFTNYYIHWVRQAPGQGLEWMGWINPNSGATNYAQKFQGRVTMTRDTSTSTVYMELSSLRSEDTAVYYCAKSWVSWFASWGQGTLVTVSSGGGGSGGGGSGGGGSELVMTQSPDSLAVSLGERATINCKSSQSVLNSSNNRNYLAWYQQKPGQPPKLLIYWASTRESGVPDRFSGSGSGTDFTLTISGLQAEDVAVYYCQQHYSTPFTFGPGTKVDIKSGGGGSEVQLVESGGGLVQPGGSLKLSCAASGFTFNKYAMNWVRQAPGKGLEWVARIRSKYNNYATYYADSVKDRFTISRDDSKNTAYLQMNNLKTEDTAVYYCVRHGNFGNSYISYWAYWGQGTLVTVSSGGGGSGGGGSGGGGSQTVVTQEPSLTVSPGGTVTLTCGSSTGAVTSGNYPNWVQQKPGQAPRGLIGGTKFLAPGTPARFSGSLLGGKAALTLSGVQPEDEAEYYCVLWYSNRWVFGGGTKLTVL

SEQ ID NO: 334 - DNA, 1500 bp, Artificial Sequence
  MCSP-G4 VH-VL-P x I2C VH-VL
caggtgcagctggtccagtctggggctgaggtgaagaggcctggggcctcaatgaaggtctcctgcaaggcttctgggtacaccttcaccaactactatatacactgggtgcgacaggcccctggacaaggtcttgagtggatgggttggatcaaccctaacagtggtgccacaaactatgcacagaagttccagggcagagtcaccatgaccagggacacgtccacgagcacagtctacatggagctgagcagcctgagatctgaggacacggccgtgtattactgtgcgaaatcctgggtctcctggtttgcttcctggggtcaaggaaccttggtcaccgtctcctcaggtggtggtggttctggcggcggcggctccggtggtggtggttctgagctcgtgatgacccagtctccagactccctggctgtgtctctgggcgagagggccaccatcaactgcaagtccagccagagtgttttaaacagctccaacaataggaactacttagcttggtaccagcagaaaccaggacagcctcctaagctgctcatttactgggcatctacccgggaatccggggtccctgaccgattcagtggcagcgggtctgggacagatttcactctcaccatcagtggcctgcaggctgaagatgtggcagtttattactgtcagcaacattatagtactccattcacttttggccctgggaccaaagtggatatcaaatccggaggtggtggatccgaggtgcagctggtcgagtctggaggaggattggtgcagcctggagggtcattgaaactctcatgtgcagcctctggattcaccttcaataagtacgccatgaactgggtccgccaggctccaggaaagggtttggaatgggttgctcgcataagaagtaaatataataattatgcaacatattatgccgattcagtgaaagacaggttcaccatctccagagatgattcaaaaaacactgcctatctacaaatgaacaacttgaaaactgaggacactgccgtgtactactgtgtgagacatgggaacttcggtaatagctacatatcctactgggcttactggggccaagggactctggtcaccgtctcctcaggtggtggtggttctggcggcggcggctccggtggtggtggttctcagactgttgtgactcaggaaccttcactcaccgtatcacctggtggaacagtcacactcacttgtggctcctcgactggggctgttacatctggcaactacccaaactgggtccaacaaaaaccaggtcaggcaccccgtggtctaataggtgggactaagttcctcgcccccggtactcctgccagattctcaggctccctgcttggaggcaaggctgccctcaccctctcaggggtacagccagaggatgaggcagaatattactgtgttctatggtacagcaaccgctgggtgttcggtggaggaaccaaactgactgtccta

SEQ ID NO: 335 - protein, 500 aa, Artificial Sequence
  MCSP-D2 VH-VL x H2C VH-VL
QVQLVQSGAEVKKPGASVKVSCKASGYTFTGYYMHWVRQAPGQGLEWMGWINPNSGGTSYAQKFQGRVTMTRDTSTSTVYMELSNLRSDDTAVYYCAKSWVSWFASWGQGTLVTVSSGGGGSGGGGSGGGGSDIVMTQSPDSLAVSLGERATINCKSSQSVLNSSNNRNYLAWYQQKPGQPPKLLIYWASTRESGVPDRFSGSGSGTDFTLTISGLQAEDVAVYYCQQHYSTPFTFGPGTKVDIKSGGGGSEVQLVESGGGLVQPGGSLKLSCAASGFTFNKYAMNWVRQAPGKGLEWVARIRSKYNNYATYYADSVKDRFTISRDDSKNTAYLQMNNLKTEDTAVYYCVRHGNFGNSYISYWAYWGQGTLVTVSSGGGGSGGGGSGGGGSQTVVTQEPSLTVSPGGTVTLTCGSSTGAVTSGYYPNWVQQKPGQAPRGLIGGTKFLAPGTPARFSGSLLGGKAALTLSGVQPEDEAEYYCALWYSNRWVFGGGTKLTVL

SEQ ID NO: 336 - DNA, 1500 bp, Artificial Sequence
  MCSP-D2 VH-VL x H2C VH-VL
caggtgcagctggtccagtctggggctgaggtgaagaagcctggggcctcagtgaaggtctcctgcaaggcttctggatacaccttcaccggctactatatgcactgggtgcgacaggcccctggacaagggcttgagtggatgggatggatcaaccctaacagtggtggcacaagctacgcacagaagttccagggcagagtcaccatgactagggacacgtccacgagcacagtctacatggagctgagcaacctgagatctgacgacacggccgtgtattactgtgcgaaatcctgggtctcctggtttgcttcctggggtcaaggaaccttggtcaccgtctcctcaggtggtggtggttctggcggcggcggctccggtggtggtggttctgatatcgtgatgacccagtctccagactccctggctgtgtctctgggcgagagggccaccatcaactgcaagtccagccagagtgttttaaacagctccaacaataggaactacttagcttggtaccagcagaaaccaggacagcctcctaagctgctcatttactgggcatctacccgggaatccggggtccctgaccgattcagtggcagcgggtctgggacagatttcactctcaccatcagtggcctgcaggctgaagatgtggcagtttattactgtcagcaacattatagtactccattcacttttggccctgggaccaaagtggatatcaaatccggaggtggtggatccgaggtgcagctggtcgagtctggaggaggattggtgcagcctggagggtcattgaaactctcatgtgcagcctctggattcaccttcaataagtacgccatgaactgggtccgccaggctccaggaaagggtttggaatgggttgctcgcataagaagtaaatataataattatgcaacatattatgccgattcagtgaaagacaggttcaccatctccagagatgattcaaaaaacactgcctatctacaaatgaacaacttgaaaactgaggacactgccgtgtactactgtgtgagacatgggaacttcggtaatagctacatatcctactgggcttactggggccaagggactctggtcaccgtctcctcaggtggtggtggttctggcggcggcggctccggtggtggtggttctcagactgttgtgactcaggaaccttcactcaccgtatcacctggtggaacagtcacactcacttgtggctcctcgactggggctgttacatctggctactacccaaactgggtccaacaaaaaccaggtcaggcaccccgtggtctaataggtgggactaagttcctcgcccccggtactcctgccagattctcaggctccctgcttggaggcaaggctgccctcaccctctcaggggtacagccagaggatgaggcagaatattactgtgctctatggtacagcaaccgctgggtgttcggtggaggaaccaaactgactgtccta

SEQ ID NO: 337 - protein, 500 aa, Artificial Sequence
  MCSP-D2 VH-VL x F12Q VH-VL
QVQLVQSGAEVKKPGASVKVSCKASGYTFTGYYMHWVRQAPGQGLEWMGWINPNSGGTSYAQKFQGRVTMTRDTSTSTVYMELSNLRSDDTAVYYCAKSWVSWFASWGQGTLVTVSSGGGGSGGGGSGGGGSDIVMTQSPDSLAVSLGERATINCKSSQSVLNSSNNRNYLAWYQQKPGQPPKLLIYWASTRESGVPDRFSGSGSGTDFTLTISGLQAEDVAVYYCQQHYSTPFTFGPGTKVDIKSGGGGSEVQLVESGGGLVQPGGSLKLSCAASGFTFNSYAMNWVRQAPGKGLEWVARIRSKYNNYATYYADSVKGRFTISRDDSKNTAYLQMNNLKTEDTAVYYCVRHGNFGNSYVSWWAYWGQGTLVTVSSGGGGSGGGGSGGGGSQTVVTQEPSLTVSPGGTVTLTCGSSTGAVTSGNYPNWVQQKPGQAPRGLIGGTKFLAPGTPARFSGSLLGGKAALTLSGVQPEDEAEYYCVLWYSNRWVFGGGTKLTVL

SEQ ID NO: 338 - DNA, 1500 bp, Artificial Sequence
  MCSP-D2 VH-VL x F12Q VH-VL
caggtgcagctggtccagtctggggctgaggtgaagaagcctggggcctcagtgaaggtctcctgcaaggcttctggatacaccttcaccggctactatatgcactgggtgcgacaggcccctggacaagggcttgagtggatgggatggatcaaccctaacagtggtggcacaagctacgcacagaagttccagggcagagtcaccatgactagggacacgtccacgagcacagtctacatggagctgagcaacctgagatctgacgacacggccgtgtattactgtgcgaaatcctgggtctcctggtttgcttcctggggtcaaggaaccttggtcaccgtctcctcaggtggtggtggttctggcggcggcggctccggtggtggtggttctgatatcgtgatgacccagtctccagactccctggctgtgtctctgggcgagagggccaccatcaactgcaagtccagccagagtgttttaaacagctccaacaataggaactacttagcttggtaccagcagaaaccaggacagcctcctaagctgctcatttactgggcatctacccgggaatccggggtccctgaccgattcagtggcagcgggtctgggacagatttcactctcaccatcagtggcctgcaggctgaagatgtggcagtttattactgtcagcaacattatagtactccattcacttttggccctgggaccaaagtggatatcaaatccggaggtggtggatccgaggtgcagctggtcgagtctggaggaggattggtgcagcctggagggtcattgaaactctcatgtgcagcctctggattcaccttcaatagctacgccatgaactgggtccgccaggctccaggaaagggtttggaatgggttgctcgcataagaagtaaatataataattatgcaacatattatgccgattcagtgaaaggcaggttcaccatctccagagatgattcaaaaaacactgcctatctacaaatgaacaacttgaaaactgaggacactgccgtgtactactgtgtgagacatgggaacttcggtaatagctacgtttcctggtgggcttactggggccaagggactctggtcaccgtctcctcaggtggtggtggttctggcggcggcggctccggtggtggtggttctcagactgttgtgactcaggaaccttcactcaccgtatcacctggtggaacagtcacactcacttgtggctcctcgactggggctgttacatctggcaactacccaaactgggtccaacaaaaaccaggtcaggcaccccgtggtctaataggtgggactaagttcctcgcccccggtactcctgccagattctcaggctccctgcttggaggcaaggctgccctcaccctctcaggggtacagccagaggatgaggcagaatattactgtgttctatggtacagcaaccgctgggtgttcggtggaggaaccaaactgactgtccta

SEQ ID NO: 339 - protein, 500 aa, Artificial Sequence
  MCSP-D2 VH-VL x I2C VH-VL
QVQLVQSGAEVKKPGASVKVSCKASGYTFTGYYMHWVRQAPGQGLEWMGWINPNSGGTSYAQKFQGRVTMTRDTSTSTVYMELSNLRSDDTAVYYCAKSWVSWFASWGQGTLVTVSSGGGGSGGGGSGGGGSDIVMTQSPDSLAVSLGERATINCKSSQSVLNSSNNRNYLAWYQQKPGQPPKLLIYWASTRESGVPDRFSGSGSGTDFTLTISGLQAEDVAVYYCQQHYSTPFTFGPGTKVDIKSGGGGSEVQLVESGGGLVQPGGSLKLSCAASGFTFNKYAMNWVRQAPGKGLEWVARIRSKYNNYATYYADSVKDRFTISRDDSKNTAYLQMNNLKTEDTAVYYCVRHGNFGNSYISYWAYWGQGTLVTVSSGGGGSGGGGSGGGGSQTVVTQEPSLTVSPGGTVTLTCGSSTGAVTSGNYPNWVQQKPGQAPRGLIGGTKFLAPGTPARFSGSLLGGKAALTLSGVQPEDEAEYYCVLWYSNRWVFGGGTKLTVL

SEQ ID NO: 340 - DNA, 1500 bp, Artificial Sequence
  MCSP-D2 VH-VL x I2C VH-VL
caggtgcagctggtccagtctggggctgaggtgaagaagcctggggcctcagtgaaggtctcctgcaaggcttctggatacaccttcaccggctactatatgcactgggtgcgacaggcccctggacaagggcttgagtggatgggatggatcaaccctaacagtggtggcacaagctacgcacagaagttccagggcagagtcaccatgactagggacacgtccacgagcacagtctacatggagctgagcaacctgagatctgacgacacggccgtgtattactgtgcgaaatcctgggtctcctggtttgcttcctggggtcaaggaaccttggtcaccgtctcctcaggtggtggtggttctggcggcggcggctccggtggtggtggttctgatatcgtgatgacccagtctccagactccctggctgtgtctctgggcgagagggccaccatcaactgcaagtccagccagagtgttttaaacagctccaacaataggaactacttagcttggtaccagcagaaaccaggacagcctcctaagctgctcatttactgggcatctacccgggaatccggggtccctgaccgattcagtggcagcgggtctgggacagatttcactctcaccatcagtggcctgcaggctgaagatgtggcagtttattactgtcagcaacattatagtactccattcacttttggccctgggaccaaagtggatatcaaatccggaggtggtggatccgaggtgcagctggtcgagtctggaggaggattggtgcagcctggagggtcattgaaactctcatgtgcagcctctggattcaccttcaataagtacgccatgaactgggtccgccaggctccaggaaagggtttggaatgggttgctcgcataagaagtaaatataataattatgcaacatattatgccgattcagtgaaagacaggttcaccatctccagagatgattcaaaaaacactgcctatctacaaatgaacaacttgaaaactgaggacactgccgtgtactactgtgtgagacatgggaacttcggtaatagctacatatcctactgggcttactggggccaagggactctggtcaccgtctcctcaggtggtggtggttctggcggcggcggctccggtggtggtggttctcagactgttgtgactcaggaaccttcactcaccgtatcacctggtggaacagtcacactcacttgtggctcctcgactggggctgttacatctggcaactacccaaactgggtccaacaaaaaccaggtcaggcaccccgtggtctaataggtgggactaagttcctcgcccccggtactcctgccagattctcaggctccctgcttggaggcaaggctgccctcaccctctcaggggtacagccagaggatgaggcagaatattactgtgttctatggtacagcaaccgctgggtgttcggtggaggaaccaaactgactgtccta

SEQ ID NO: 341 - protein, 500 aa, Artificial Sequence
  MCSP-D2 VH-VL-P x H2C VH-VL-P
QVQLVQSGAEVKKPGASVKVSCKASGYTFTGYYMHWVRQAPGQGLEWMGWINPNSGGTSYAQKFQGRVTMTRDTSTSTVYMELSNLRSDDTAVYYCAKSWVSWFASWGQGTLVTVSSGGGGSGGGGSGGGGSELVMTQSPDSLAVSLGERATINCKSSQSVLNSSNNRNYLAWYQQKPGQPPKLLIYWASTRESGVPDRFSGSGSGTDFTLTISGLQAEDVAVYYCQQHYSTPFTFGPGTKVDIKSGGGGSEVQLLESGGGLVQPGGSLKLSCAASGFTFNKYAMNWVRQAPGKGLEWVARIRSKYNNYATYYADSVKDRFTISRDDSKNTAYLQMNNLKTEDTAVYYCVRHGNFGNSYISYWAYWGQGTLVTVSSGGGGSGGGGSGGGGSELVVTQEPSLTVSPGGTVTLTCGSSTGAVTSGYYPNWVQQKPGQAPRGLIGGTKFLAPGTPARFSGSLLGGKAALTLSGVQPEDEAEYYCALWYSNRWVFGGGTKLTVL

SEQ ID NO: 342 - DNA, 1500 bp, Artificial Sequence
  MCSP-D2 VH-VL-P x H2C VH-VL-P
caggtgcagctggtccagtctggggctgaggtgaagaagcctggggcctcagtgaaggtctcctgcaaggcttctggatacaccttcaccggctactatatgcactgggtgcgacaggcccctggacaagggcttgagtggatgggatggatcaaccctaacagtggtggcacaagctacgcacagaagttccagggcagagtcaccatgactagggacacgtccacgagcacagtctacatggagctgagcaacctgagatctgacgacacggccgtgtattactgtgcgaaatcctgggtctcctggtttgcttcctggggtcaaggaaccttggtcaccgtctcctcaggtggtggtggttctggcggcggcggctccggtggtggtggttctgagctcgtgatgacccagtctccagactccctggctgtgtctctgggcgagagggccaccatcaactgcaagtccagccagagtgttttaaacagctccaacaataggaactacttagcttggtaccagcagaaaccaggacagcctcctaagctgctcatttactgggcatctacccgggaatccggggtccctgaccgattcagtggcagcgggtctgggacagatttcactctcaccatcagtggcctgcaggctgaagatgtggcagtttattactgtcagcaacattatagtactccattcacttttggccctgggaccaaagtggatatcaaatccggaggtggtggatccgaggtgcagctgctcgagtctggaggaggattggtgcagcctggagggtcattgaaactctcatgtgcagcctctggattcaccttcaataagtacgccatgaactgggtccgccaggctccaggaaagggtttggaatgggttgctcgcataagaagtaaatataataattatgcaacatattatgccgattcagtgaaagacaggttcaccatctccagagatgattcaaaaaacactgcctatctacaaatgaacaacttgaaaactgaggacactgccgtgtactactgtgtgagacatgggaacttcggtaatagctacatatcctactgggcttactggggccaagggactctggtcaccgtctcctcaggtggtggtggttctggcggcggcggctccggtggtggtggttctgagctcgttgtgactcaggaaccttcactcaccgtatcacctggtggaacagtcacactcacttgtggctcctcgactggggctgttacatctggctactacccaaactgggtccaacaaaaaccaggtcaggcaccccgtggtctaataggtgggactaagttcctcgcccccggtactcctgccagattctcaggctccctgcttggaggcaaggctgccctcaccctctcaggggtacagccagaggatgaggcagaatattactgtgctctatggtacagcaaccgctgggtgttcggtggaggaaccaaactgactgtccta

SEQ ID NO: 343 - protein, 499 aa, Artificial Sequence
  MCSP-F9 VH-VL x H2C VH-VL
QVQLQESGPGLVKPSETLSLTCVVSGGSISSSNWWSWVRQPPGKGLEWLGTIYYNGNTYYNPSLKSRVTISVDTSKNQFSLRLSSVTAADTAVYYCAKSWVSWFASWGQGTLVTVSSGGGGSGGGGSGGGGSDIVMTQSPDSLAVSLGERATINCKSSQSVLSSSNNKNYLNWYQQKPGQPPKLLIYWASTRESGVPDRFSGSGSGTDFTLTISSLQAEDVAVYYCQQHYSVPFTFGPGTKVDIKGGGGSEVQLVESGGGLVQPGGSLKLSCAASGFTFNKYAMNWVRQAPGKGLEWVARIRSKYNNYATYYADSVKDRFTISRDDSKNTAYLQMNNLKTEDTAVYYCVRHGNFGNSYISYWAYWGQGTLVTVSSGGGGSGGGGSGGGGSQTVVTQEPSLTVSPGGTVTLTCGSSTGAVTSGYYPNWVQQKPGQAPRGLIGGTKFLAPGTPARFSGSLLGGKAALTLSGVQPEDEAEYYCALWYSNRWVFGGGTKLTVL

SEQ ID NO: 344 - DNA, 1497 bp, Artificial Sequence
  MCSP-F9 VH-VL x H2C VH-VL
caggtgcagctgcaagagtctggcccaggactggtgaagccttcggagaccctgtccctcacctgcgttgtctctggtggctccatcagcagtagtaactggtggagctgggtccgccagcccccagggaagggactggagtggcttgggactatctattataatgggaatacctactacaacccgtccctcaagagtcgagtcaccatctccgtagacacgtccaagaaccagttctccctgaggctgagctctgtgaccgccgcagacacggccgtgtattactgtgcgaaatcctgggtctcctggtttgcttcctggggtcaaggaaccttggtcaccgtctcctcaggtggtggtggttctggcggcggcggctccggtggtggtggttctgatatcgtgatgacacagtctccagactccctggctgtgtctctgggcgagagggccaccatcaactgcaagtccagccagagtgtcttatccagctccaacaataagaactacttaaattggtaccagcagaaaccaggacagcctcctaagttgctcatttactgggcatctacccgggaatccggggtccctgaccgattcagtggcagcgggtctgggacagatttcactctcaccatcagcagcctgcaggctgaagatgtggcagtttattactgtcagcaacattatagtgttccattcactttcggccctgggaccaaagtggatatcaaaggaggtggtggctccgaggtgcagctggtcgagtctggaggaggattggtgcagcctggagggtcattgaaactctcatgtgcagcctctggattcaccttcaataagtacgccatgaactgggtccgccaggctccaggaaagggtttggaatgggttgctcgcataagaagtaaatataataattatgcaacatattatgccgattcagtgaaagacaggttcaccatctccagagatgattcaaaaaacactgcctatctacaaatgaacaacttgaaaactgaggacactgccgtgtactactgtgtgagacatgggaacttcggtaatagctacatatcctactgggcttactggggccaagggactctggtcaccgtctcctcaggtggtggtggttctggcggcggcggctccggtggtggtggttctcagactgttgtgactcaggaaccttcactcaccgtatcacctggtggaacagtcacactcacttgtggctcctcgactggggctgttacatctggctactacccaaactgggtccaacaaaaaccaggtcaggcaccccgtggtctaataggtgggactaagttcctcgcccccggtactcctgccagattctcaggctccctgcttggaggcaaggctgccctcaccctctcaggggtacagccagaggatgaggcagaatattactgtgctctatggtacagcaaccgctgggtgttcggtggaggaaccaaactgactgtccta

SEQ ID NO: 345 - protein, 500 aa, Artificial Sequence
  MCSP-F9 VH-VL-P x H2C VH-VL-P
EVQLQESGPGLVKPSETLSLTCVVSGGSISSSNWWSWVRQPPGKGLEWLGTIYYNGNTYYNPSLKSRVTISVDTSKNQFSLRLSSVTAADTAVYYCAKSWVSWFASWGQGTLVTVSSGGGGSGGGGSGGGGSELVMTQSPDSLAVSLGERATINCKSSQSVLSSSNNKNYLNWYQQKPGQPPKLLIYWASTRESGVPDRFSGSGSGTDFTLTISSLQAEDVAVYYCQQHYSVPFTFGPGTKVDIKSGGGGSEVQLLESGGGLVQPGGSLKLSCAASGFTFNKYAMNWVRQAPGKGLEWVARIRSKYNNYATYYADSVKDRFTISRDDSKNTAYLQMNNLKTEDTAVYYCVRHGNFGNSYISYWAYWGQGTLVTVSSGGGGSGGGGSGGGGSELVVTQEPSLTVSPGGTVTLTCGSSTGAVTSGYYPNWVQQKPGQAPRGLIGGTKFLAPGTPARFSGSLLGGKAALTLSGVQPEDEAEYYCALWYSNRWVFGGGTKLTVL

SEQ ID NO: 346 - DNA, 1500 bp, Artificial Sequence
  MCSP-F9 VH-VL-P x H2C VH-VL-P
gaggtgcagctgcaagagtctggcccaggactggtgaagccttcggagaccctgtccctcacctgcgttgtctctggtggctccatcagcagtagtaactggtggagctgggtccgccagcccccagggaagggactggagtggcttgggactatctattataatgggaatacctactacaacccgtccctcaagagtcgagtcaccatctccgtagacacgtccaagaaccagttctccctgaggctgagctctgtgaccgccgcagacacggccgtgtattactgtgcgaaatcctgggtctcctggtttgcttcctggggtcaaggaaccttggtcaccgtctcctcaggtggtggtggttctggcggcggcggctccggtggtggtggttctgagctcgtgatgacacagtctccagactccctggctgtgtctctgggcgagagggccaccatcaactgcaagtccagccagagtgtcttatccagctccaacaataagaactacttaaattggtaccagcagaaaccaggacagcctcctaagttgctcatttactgggcatctacccgggaatccggggtccctgaccgattcagtggcagcgggtctgggacagatttcactctcaccatcagcagcctgcaggctgaagatgtggcagtttattactgtcagcaacattatagtgttccattcactttcggccctgggaccaaagtggatatcaaatccggaggtggtggatccgaggtgcagctgctcgagtctggaggaggattggtgcagcctggagggtcattgaaactctcatgtgcagcctctggattcaccttcaataagtacgccatgaactgggtccgccaggctccaggaaagggtttggaatgggttgctcgcataagaagtaaatataataattatgcaacatattatgccgattcagtgaaagacaggttcaccatctccagagatgattcaaaaaacactgcctatctacaaatgaacaacttgaaaactgaggacactgccgtgtactactgtgtgagacatgggaacttcggtaatagctacatatcctactgggcttactggggccaagggactctggtcaccgtctcctcaggtggtggtggttctggcggcggcggctccggtggtggtggttctgagctcgttgtgactcaggaaccttcactcaccgtatcacctggtggaacagtcacactcacttgtggctcctcgactggggctgttacatctggctactacccaaactgggtccaacaaaaaccaggtcaggcaccccgtggtctaataggtgggactaagttcctcgcccccggtactcctgccagattctcaggctccctgcttggaggcaaggctgccctcaccctctcaggggtacagccagaggatgaggcagaatattactgtgctctatggtacagcaaccgctgggtgttcggtggaggaaccaaactgactgtccta

SEQ ID NO: 347 - protein, 500 aa, Artificial Sequence
  MCSP-F9 VH-VL-P x G4H VH-VL-P
EVQLQESGPGLVKPSETLSLTCVVSGGSISSSNWWSWVRQPPGKGLEWLGTIYYNGNTYYNPSLKSRVTISVDTSKNQFSLRLSSVTAADTAVYYCAKSWVSWFASWGQGTLVTVSSGGGGSGGGGSGGGGSELVMTQSPDSLAVSLGERATINCKSSQSVLSSSNNKNYLNWYQQKPGQPPKLLIYWASTRESGVPDRFSGSGSGTDFTLTISSLQAEDVAVYYCQQHYSVPFTFGPGTKVDIKSGGGGSEVQLLESGGGLVQPGGSLKLSCAASGFTFNRYAMNWVRQAPGKGLEWVARIRSKYNNYATYYADSVKGRFTISRDDSKNTAYLQMNNLKTEDTAVYYCVRHGNFGNSYLSYFAYWGQGTLVTVSSGGGGSGGGGSGGGGSELVVTQEPSLTVSPGGTVTLTCGSSTGAVTSGYYPNWVQQKPGQAPRGLIGGTKFLAPGTPARFSGSLLGGKAALTLSGVQPEDEAEYYCALWYSNRWVFGGGTKLTVL

SEQ ID NO: 348 - DNA, 1500 bp, Artificial Sequence
  MCSP-F9 VH-VL-P x G4H VH-VL-P
gaggtgcagctgcaagagtctggcccaggactggtgaagccttcggagaccctgtccctcacctgcgttgtctctggtggctccatcagcagtagtaactggtggagctgggtccgccagcccccagggaagggactggagtggcttgggactatctattataatgggaatacctactacaacccgtccctcaagagtcgagtcaccatctccgtagacacgtccaagaaccagttctccctgaggctgagctctgtgaccgccgcagacacggccgtgtattactgtgcgaaatcctgggtctcctggtttgcttcctggggtcaaggaaccttggtcaccgtctcctcaggtggtggtggttctggcggcggcggctccggtggtggtggttctgagctcgtgatgacacagtctccagactccctggctgtgtctctgggcgagagggccaccatcaactgcaagtccagccagagtgtcttatccagctccaacaataagaactacttaaattggtaccagcagaaaccaggacagcctcctaagttgctcatttactgggcatctacccgggaatccggggtccctgaccgattcagtggcagcgggtctgggacagatttcactctcaccatcagcagcctgcaggctgaagatgtggcagtttattactgtcagcaacattatagtgttccattcactttcggccctgggaccaaagtggatatcaaatccggaggtggtggatccgaggtgcagctgctcgagtctggaggaggattggtgcagcctggagggtcattgaaactctcatgtgcagcctctggattcaccttcaatcgctacgccatgaactgggtccgccaggctccaggaaagggtttggaatgggttgctcgcataagaagtaaatataataattatgcaacatattatgccgattcagtgaaagggaggttcaccatctccagagatgattcaaaaaacactgcctatctacaaatgaacaacttgaaaactgaggacactgccgtgtactactgtgtgagacatgggaacttcggtaatagctacttatcctacttcgcttactggggccaagggactctggtcaccgtctcctcaggtggtggtggttctggcggcggcggctccggtggtggtggttctgagctcgttgtgactcaggaaccttcactcaccgtatcacctggtggaacagtcacactcacttgtggctcctcgactggggctgttacatctggctactacccaaactgggtccaacaaaaaccaggtcaggcaccccgtggtctaataggtgggactaagttcctcgcccccggtactcctgccagattctcaggctccctgcttggaggcaaggctgccctcaccctctcaggggtacagccagaggatgaggcagaatattactgtgctctatggtacagcaaccgctgggtgttcggtggaggaaccaaactgactgtccta

SEQ ID NO: 349 - protein, 267 aa, Artificial Sequence
  1-27 CD3epsilon-Fc
QDGNEEMGGITQTPYKVSISGTTVILTSGEPKSCDKTHTCPPCPAPELLGGPSVFLFPPKPKDTLMISRTPEVTCVVVDVSHEDPEVKFNWYVDGVEVHNAKTKPREEQYNSTYRVVSVLTVLHQDWLNGKEYKCKVSNKALPAPIEKTISKAKGQPREPQVYTLPPSREEMTKNQVSLTCLVKGFYPSDIAVEWESNGQPENNYKTTPPVLDSDGSFFLYSKLTVDKSRWQQGNVFSCSVMHEALHNHYTQKSLSLSPGKHHHHHH

SEQ ID NO: 350 - DNA, 858 bp, Artificial Sequence
  1-27 CD3epsilon-Fc
atgggatggagctgtatcatcctcttcttggtagcaacagctacaggtgtacactcccaagatggtaatgaagaaatgggtggtattacacagacaccatataaagtctccatctctggaaccacagtaatattgacatccggagagcccaaatcttgtgacaaaactcacacatgcccaccgtgcccagcacctgaactcctggggggaccgtcagtcttcctcttccccccaaaacccaaggacaccctcatgatctcccggacccctgaggtcacatgcgtggtggtggacgtgagccacgaagaccctgaggtcaagttcaactggtacgtggacggcgtggaggtgcataatgccaagacaaagccgcgggaggagcagtacaacagcacgtaccgtgtggtcagcgtcctcaccgtcctgcaccaggactggctgaatggcaaggagtacaagtgcaaggtctccaacaaagccctcccagcccccatcgagaaaaccatctccaaagccaaagggcagccccgagaaccacaggtgtacaccctgcccccatcccgggaggagatgaccaagaaccaggtcagcctgacctgcctggtcaaaggcttctatcccagcgacatcgccgtggagtgggagagcaatgggcagccggagaacaactacaagaccacgcctcccgtgctggactccgacggctccttcttcctctatagcaagctcaccgtggacaagagcaggtggcagcaggggaacgtcttctcatgctccgtgatgcatgaggctctgcacaaccactacacgcagaagagcctctccctgtccccgggtaaacatcatcaccatcatcat

SEQ ID NO: 351 - protein, 333 aa, Artificial Sequence
  human 1-27 CD3epsilon-EpCAM
QDGNEEMGGITQTPYKVSISGTTVILTDYKDDDDKTASFAAAQKECVCENYKLAVNCFLNDNGQCQCTSIGAQNTVLCSKLAAKCLVMKAEMNGSKLGRRAKPEGALQNNDGLYDPDCDESGLFKAKQCNGTSTCWCVNTAGVRRTDKDTEITCSERVRTYWIIIELKHKAREKPYDVQSLRTALEEAIKTRYQLDPKFITNILYEDNVITIDLVQNSSQKTQNDVDIADVAYYFEKDVKGESLFHSKKMDLRVNGEQLDLDPGQTLIYYVDEKAPEFSMQGLKAGVIAVIVVVVIAIVAGIVVLVISRKKRMAKYEKAEIKEMGEMHRELNA

SEQ ID NO: 352 - DNA, 1056 bp, Artificial Sequence
  human 1-27 CD3epsilon-EpCAM
atgggatggagctgtatcatcctcttcttggtagcaacagctacaggtgtacactcccaagatggtaatgaagaaatgggtggtattacacagacaccatataaagtctccatctctggaaccacagtaatattgacagattacaaggacgacgatgacaagactgcgagttttgccgcagctcagaaagaatgtgtctgtgaaaactacaagctggccgtaaactgctttttgaatgacaatggtcaatgccagtgtacttcgattggtgcacaaaatactgtcctttgctcaaagctggctgccaaatgtttggtgatgaaggcagaaatgaacggctcaaaacttgggagaagagcgaaacctgaaggggctctccagaacaatgatggcctttacgatcctgactgcgatgagagcgggctctttaaggccaagcagtgcaacggcacctccacgtgctggtgtgtgaacactgctggggtcagaagaactgacaaggacactgaaataacctgctctgagcgagtgagaacctactggatcatcattgaattaaaacacaaagcaagagaaaaaccttatgatgttcaaagtttgcggactgcacttgaggaggcgatcaaaacgcgttatcaactggatccaaaatttatcacaaatattttgtatgaggataatgttatcactattgatctggttcaaaattcttctcagaaaactcagaatgatgtggacatagctgatgtggcttattattttgaaaaagatgttaaaggtgaatccttgtttcattctaagaaaatggacctgagagtaaatggggaacaactggatctggatcctggtcaaactttaatttattatgtcgatgaaaaagcacctgaattctcaatgcagggtctaaaagctggtgttattgctgttattgtggttgtggtgatagcaattgttgctggaattgttgtgctggttatttccagaaagaagagaatggcaaagtatgagaaggctgagataaaggagatgggtgagatgcatagggaactcaatgca

SEQ ID NO: 353 - protein, 333 aa, Artificial Sequence
  marmoset 1-27 CD3epsilon-EpCAM
QDGNEEMGDTTQNPYKVSISGTTVTLTDYKDDDDKTASFAAAQKECVCENYKLAVNCFLNDNGQCQCTSIGAQNTVLCSKLAAKCLVMKAEMNGSKLGRRAKPEGALQNNDGLYDPDCDESGLFKAKQCNGTSTCWCVNTAGVRRTDKDTEITCSERVRTYWIIIELKHKAREKPYDVQSLRTALEEAIKTRYQLDPKFITNILYEDNVITIDLVQNSSQKTQNDVDIADVAYYFEKDVKGESLFHSKKMDLRVNGEQLDLDPGQTLIYYVDEKAPEFSMQGLKAGVIAVIVVVVIAIVAGIVVLVISRKKRMAKYEKAEIKEMGEMHRELNA

SEQ ID NO: 354 - DNA, 1056 bp, Artificial Sequence
  marmoset 1-27 CD3epsilon-EpCAM
atgggatggagctgtatcatcctcttcttggtagcaacagctacaggtgtacactcccaggacggtaatgaagaaatgggtgatactacacagaacccatataaagtttccatctcaggaaccacagtaacactgacagattacaaggacgacgatgacaagactgcgagttttgccgcagctcagaaagaatgtgtctgtgaaaactacaagctggccgtaaactgctttttgaatgacaatggtcaatgccagtgtacttcgattggtgcacaaaatactgtcctttgctcaaagctggctgccaaatgtttggtgatgaaggcagaaatgaacggctcaaaacttgggagaagagcgaaacctgaaggggctctccagaacaatgatggcctttacgatcctgactgcgatgagagcgggctctttaaggccaagcagtgcaacggcacctccacgtgctggtgtgtgaacactgctggggtcagaagaactgacaaggacactgaaataacctgctctgagcgagtgagaacctactggatcatcattgaattaaaacacaaagcaagagaaaaaccttatgatgttcaaagtttgcggactgcacttgaggaggcgatcaaaacgcgttatcaactggatccaaaatttatcacaaatattttgtatgaggataatgttatcactattgatctggttcaaaattcttctcagaaaactcagaatgatgtggacatagctgatgtggcttattattttgaaaaagatgttaaaggtgaatccttgtttcattctaagaaaatggacctgagagtaaatggggaacaactggatctggatcctggtcaaactttaatttattatgtcgatgaaaaagcacctgaattctcaatgcagggtctaaaagctggtgttattgctgttattgtggttgtggtgatagcaattgttgctggaattgttgtgctggttatttccagaaagaagagaatggcaaagtatgagaaggctgagataaaggagatgggtgagatgcatagggaactcaatgca

SEQ ID NO: 355 - protein, 333 aa, Artificial Sequence; identical to SEQ ID NO: 353
  tamarin 1-27 CD3epsilon-EpCAM

SEQ ID NO: 356 - DNA, 1056 bp, Artificial Sequence; identical to SEQ ID NO: 354
  tamarin 1-27 CD3epsilon-EpCAM

SEQ ID NO: 357 - DNA, 1056 bp, Artificial Sequence
  squirrel monkey 1-27 CD3epsilon-EpCAM
atgggatggagctgtatcatcctcttcttggtagcaacagctacaggtgtacactcccaggacggtaatgaagagattggtgatactacccagaacccatataaagtttccatctcaggaaccacagtaacactgacagattacaaggacgacgatgacaagactgcgagttttgccgcagctcagaaagaatgtgtctgtgaaaactacaagctggccgtaaactgctttttgaatgacaatggtcaatgccagtgtacttcgattggtgcacaaaatactgtcctttgctcaaagctggctgccaaatgtttggtgatgaaggcagaaatgaacggctcaaaacttgggagaagagcgaaacctgaaggggctctccagaacaatgatggcctttacgatcctgactgcgatgagagcgggctctttaaggccaagcagtgcaacggcacctccacgtgctggtgtgtgaacactgctggggtcagaagaactgacaaggacactgaaataacctgctctgagcgagtgagaacctactggatcatcattgaattaaaacacaaagcaagagaaaaaccttatgatgttcaaagtttgcggactgcacttgaggaggcgatcaaaacgcgttatcaactggatccaaaatttatcacaaatattttgtatgaggataatgttatcactattgatctggttcaaaattcttctcagaaaactcagaatgatgtggacatagctgatgtggcttattattttgaaaaagatgttaaaggtgaatccttgtttcattctaagaaaatggacctgagagtaaatggggaacaactggatctggatcctggtcaaactttaatttattatgtcgatgaaaaagcacctgaattctcaatgcagggtctaaaagctggtgttattgctgttattgtggttgtggtgatagcaattgttgctggaattgttgtgctggttatttccagaaagaagagaatggcaaagtatgagaaggctgagataaaggagatgggtgagatgcatagggaactcaatgca

SEQ ID NO: 358 - protein, 333 aa, Artificial Sequence
  squirrel monkey 1-27 CD3epsilon-EpCAM
QDGNEEIGDTTQNPYKVSISGTTVTLTDYKDDDDKTASFAAAQKECVCENYKLAVNCFLNDNGQCQCTSIGAQNTVLCSKLAAKCLVMKAEMNGSKLGRRAKPEGALQNNDGLYDPDCDESGLFKAKQCNGTSTCWCVNTAGVRRTDKDTEITCSERVRTYWIIIELKHKAREKPYDVQSLRTALEEAIKTRYQLDPKFITNILYEDNVITIDLVQNSSQKTQNDVDIADVAYYFEKDVKGESLFHSKKMDLRVNGEQLDLDPGQTLIYYVDEKAPEFSMQGLKAGVIAVIVVVVIAIVAGIVVLVISRKKRMAKYEKAEIKEMGEMHRELNA

SEQ ID NO: 359 - protein, 333 aa, Artificial Sequence
  swine 1-27 CD3epsilon-EpCAM
QEDIERPDEDTQKTFKVSISGDKVELTDYKDDDDKTASFAAAQKECVCENYKLAVNCFLNDNGQCQCTSIGAQNTVLCSKLAAKCLVMKAEMNGSKLGRRAKPEGALQNNDGLYDPDCDESGLFKAKQCNGTSTCWCVNTAGVRRTDKDTEITCSERVRTYWIIIELKHKAREKPYDVQSLRTALEEAIKTRYQLDPKFITNILYEDNVITIDLVQNSSQKTQNDVDIADVAYYFEKDVKGESLFHSKKMDLRVNGEQLDLDPGQTLIYYVDEKAPEFSMQGLKAGVIAVIVVVVIAIVAGIVVLVISRKKRMAKYEKAEIKEMGEMHRELNA

SEQ ID NO: 360 - DNA, 1056 bp, Artificial Sequence
  swine 1-27 CD3epsilon-EpCAM
atgggatggagctgtatcatcctcttcttggtagcaacagctacaggtgtacactcccaagaagacattgaaagaccagatgaagatacacagaaaacatttaaagtctccatctctggagacaaagtagagctgacagattacaaggacgacgatgacaagactgcgagttttgccgcagctcagaaagaatgtgtctgtgaaaactacaagctggccgtaaactgctttttgaatgacaatggtcaatgccagtgtacttcgattggtgcacaaaatactgtcctttgctcaaagctggctgccaaatgtttggtgatgaaggcagaaatgaacggctcaaaacttgggagaagagcgaaacctgaaggggctctccagaacaatgatggcctttacgatcctgactgcgatgagagcgggctctttaaggccaagcagtgcaacggcacctccacgtgctggtgtgtgaacactgctggggtcagaagaactgacaaggacactgaaataacctgctctgagcgagtgagaacctactggatcatcattgaattaaaacacaaagcaagagaaaaaccttatgatgttcaaagtttgcggactgcacttgaggaggcgatcaaaacgcgttatcaactggatccaaaatttatcacaaatattttgtatgaggataatgttatcactattgatctggttcaaaattcttctcagaaaactcagaatgatgtggacatagctgatgtggcttattattttgaaaaagatgttaaaggtgaatccttgtttcattctaagaaaatggacctgagagtaaatggggaacaactggatctggatcctggtcaaactttaatttattatgtcgatgaaaaagcacctgaattctcaatgcagggtctaaaagctggtgttattgctgttattgtggttgtggtgatagcaattgttgctggaattgttgtgctggttatttccagaaagaagagaatggcaaagtatgagaaggctgagataaaggagatgggtgagatgcatagggaactcaatgca

SEQ ID NO: 361 - protein, 186 aa, Homo sapiens
QDGNEEMGGITQTPYKVSISGTTVILTCPQYPGSEILWQHNDKNIGGDEDDKNIGSDEDHLSLKEFSELEQSGYYVCYPRGSKPEDANFYLYLRARVCENCMEMDVMSVATIVIVDICITGGLLLLVYYWSKNRKAKAKPVTRGAGAGGRQRGQNKERPPPVPNPDYEPIRKGQRDLYSGLNQRRI

SEQ ID NO: 362 - DNA, 621 bp, Homo sapiens
atgcagtcgggcactcactggagagttctgggcctctgcctcttatcagttggcgtttgggggcaagatggtaatgaagaaatgggtggtattacacagacaccatataaagtctccatctctggaaccacagtaatattgacatgccctcagtatcctggatctgaaatactatggcaacacaatgataaaaacataggcggtgatgaggatgataaaaacataggcagtgatgaggatcacctgtcactgaaggaattttcagaattggagcaaagtggttattatgtctgctaccccagaggaagcaaaccagaagatgcgaacttttatctctacctgagggcacgcgtgtgtgagaactgcatggagatggatgtgatgtcggtggccacaattgtcatagtggacatctgcatcactgggggcttgctgctgctggtttactactggagcaagaatagaaaggccaaggccaagcctgtgacacgaggagcgggtgctggcggcaggcaaaggggacaaaacaaggagaggccaccacctgttcccaacccagactatgagcccatccggaaaggccagcgggacctgtattctggcctgaatcagagacgcatc

SEQ ID NO: 363 - protein, 19 aa, Artificial Sequence
  19 amino acid immunoglobulin leader peptide
MGWSCIILFLVATATGVHS

SEQ ID NO: 364 - DNA, 57 bp, Artificial Sequence
  19 amino acid immunoglobulin leader peptide
atgggatggagctgtatcatcctcttcttggtagcaacagctacaggtgtacactcc

SEQ ID NO: 365 - protein, 324 aa, Mus sp.
AKTTPPSVYPLAPGSAAQTNSMVTLGCLVKGYFPEPVTVTWNSGSLSSGVHTFPAVLQSDLYTLSSSVTVPSSTWPSETVTCNVAHPASSTKVDKKIVPRDCGCKPCICTVPEVSSVFIFPPKPKDVLTITLTPKVTCVVVDISKDDPEVQFSWFVDDVEVHTAQTQPREEQFNSTFRSVSELPIMHQDWLNGKEFKCRVNSAAFPAPIEKTISKTKGRPKAPQVYTIPPPKEQMAKDKVSLTCMITDFFPEDITVEWQWNGQPAENYKNTQPIMDTDGSYFVYSKLNVQKSNWEAGNTFTCSVLHEGLHNHHTEKSLSHSPGK

SEQ ID NO: 366 - DNA, 972 bp, Mus sp.
gccaaaacgacacccccatctgtctatccactggcccctggatctgctgcccaaactaactccatggtgaccctgggatgcctggtcaagggctatttccctgagccagtgacagtgacctggaactctggatccctgtccagcggtgtgcacaccttcccagctgtcctgcagtctgacctctacactctgagcagctcagtgactgtcccctccagcacctggcccagcgagaccgtcacctgcaacgttgcccacccggccagcagcaccaaggtggacaagaaaattgtgcccagggattgtggttgtaagccttgcatatgtacagtcccagaagtatcatctgtcttcatcttccccccaaagcccaaggatgtgctcaccattactctgactcctaaggtcacgtgtgttgtggtagacatcagcaaggatgatcccgaggtccagttcagctggtttgtagatgatgtggaggtgcacacagctcagacgcaaccccgggaggagcagttcaacagcactttccgctcagtcagtgaacttcccatcatgcaccaggactggctcaatggcaaggagttcaaatgcagggtcaacagtgcagctttccctgcccccatcgagaaaaccatctccaaaaccaaaggcagaccgaaggctccacaggtgtacaccattccacctcccaaggagcagatggccaaggataaagtcagtctgacctgcatgataacagacttcttccctgaagacattactgtggagtggcagtggaatgggcagccagcggagaactacaagaacactcagcccatcatggacacagatggctcttacttcgtctacagcaagctcaatgtgcagaagagcaactgggaggcaggaaatactttcacctgctctgtgttacatgagggcctgcacaaccaccatactgagaagagcctctcccactctcctggtaaa

SEQ ID NO: 367 - protein, 106 aa, Homo sapiens
GQPKAAPSVTLFPPSSEELQANKATLVCLISDFYPGAVTVAWKADSSPVKAGVETTTPSKQSNNKYAASSYLSLTPEQWKSHKSYSCQVTHEGSTVEKTVAPTECS

SEQ ID NO: 368 - DNA, 318 bp, Homo sapiens
ggtcagcccaaggctgccccctcggtcactctgttcccaccctcctctgaggagcttcaagccaacaaggccacactggtgtgtctcataagtgacttctacccgggagccgtgacagtggcctggaaggcagatagcagccccgtcaaggcgggagtggagaccaccacaccctccaaacaaagcaacaacaagtacgcggccagcagctacctgagcctgacgcctgagcagtggaagtcccacaaaagctacagctgccaggtcacgcatgaagggagcaccgtggagaagacagtggcccctacagaatgttca

SEQ ID NO: 369 - protein, 1186 aa, Homo sapiens
LEEKKVCQGTSNKLTQLGTFEDHFLSLQRMFNNCEVVLGNLEITYVQRNYDLSFLKTIQEVAGYVLIALNTVERIPLENLQIIRGNMYYENSYALAVLSNYDANKTGLKELPMRNLQEILHGAVRFSNNPALCNVESIQWRDIVSSDFLSNMSMDFQNHLGSCQKCDPSCPNGSCWGAGEENCQKLTKIICAQQCSGRCRGKSPSDCCHNQCAAGCTGPRESDCLVCRKFRDEATCKDTCPPLMLYNPTTYQMDVNPEGKYSFGATCVKKCPRNYVVTDHGSCVRACGADSYEMEEDGVRKCKKCEGPCRKVCNGIGIGEFKDSLSINATNIKHFKNCTSISGDLHILPVAFRGDSFTHTPPLDPQELDILKTVKEITGFLLIQAWPENRTDLHAFENLEIIRGRTKQHGQFSLAVVSLNITSLGLRSLKEISDGDVIISGNKNLCYANTINWKKLFGTSGQKTKIISNRGENSCKATGQVCHALCSPEGCWGPEPRDCVSCRNVSRGRECVDKCNLLEGEPREFVENSECIQCHPECLPQAMNITCTGRGPDNCIQCAHYIDGPHCVKTCPAGVMGENNTLVWKYADAGHVCHLCHPNCTYGCTGPGLEGCPTNGPKIPSIATGMVGALLLLLVVALGIGLFMRRRHIVRKRTLRRLLQERELVEPLTPSGEAPNQALLRILKETEFKKIKVLGSGAFGTVYKGLWIPEGEKVKIPVAIKELREATSPKANKEILDEAYVMASVDNPHVCRLLGICLTSTVQLITQLMPFGCLLDYVREHKDNIGSQYLLNWCVQIAKGMNYLEDRRLVHRDLAARNVLVKTPQHVKITDFGLAKLLGAEEKEYHAEGGKVPIKWMALESILHRIYTHQSDVWSYGVTVWELMTFGSKPYDGIPASEISSILEKGERLPQPPICTIDVYMIMVKCWMIDADSRPKFRELIIEFSKMARDPQRYLVIQGDERMHLPSPTDSNFYRALMDEEDMDDVVDADEYLIPQQGFFSSPSTSRTPLLSSLSATSNNSTVACIDRNGLQSCPIKEDSFLQRYSSDPTGALTEDSIDDTFLPVPEYINQSVPKRPAGSVQNPVYHNQPLNPAPSRDPHYQDPHSTAVGNPEYLNTVQPTCVNSTFDSPAHWAQKGSHQISLDNPDYQQDFFPKEAKPNGIFKGSTAENAEYLRVAPQSSEFIGA

SEQ ID NO: 370 - DNA, 3630 bp, Homo sapiens
atgcgaccctccgggacggccggggcagcgctcctggcgctgctggctgcgctctgcccggcgagtcgggctctggaggaaaagaaagtttgccaaggcacgagtaacaagctcacgcagttgggcacttttgaagatcattttctcagcctccagaggatgttcaataactgtgaggtggtccttgggaatttggaaattacctatgtgcagaggaattatgatctttccttcttaaagaccatccaggaggtggctggttatgtcctcattgccctcaacacagtggagcgaattcctttggaaaacctgcagatcatcagaggaaatatgtactacgaaaattcctatgccttagcagtcttatctaactatgatgcaaataaaaccggactgaaggagctgcccatgagaaatttacaggaaatcctgcatggcgccgtgcggttcagcaacaaccctgccctgtgcaacgtggagagcatccagtggcgggacatagtcagcagtgactttctcagcaacatgtcgatggacttccagaaccacctgggcagctgccaaaagtgtgatccaagctgtcccaatgggagctgctggggtgcaggagaggagaactgccagaaactgaccaaaatcatctgtgcccagcagtgctccgggcgctgccgtggcaagtcccccagtgactgctgccacaaccagtgtgctgcaggctgcacaggcccccgggagagcgactgcctggtctgccgcaaattccgagacgaagccacgtgcaaggacacctgccccccactcatgctctacaaccccaccacgtaccagatggatgtgaaccccgagggcaaatacagctttggtgccacctgcgtgaagaagtgtccccgtaattatgtggtgacagatcacggctcgtgcgtccgagcctgtggggccgacagctatgagatggaggaagacggcgtccgcaagtgtaagaagtgcgaagggccttgccgcaaagtgtgtaacggaataggtattggtgaatttaaagactcactctccataaatgctacgaatattaaacacttcaaaaactgcacctccatcagtggcgatctccacatcctgccggtggcatttaggggtgactccttcacacatactcctcctctggatccacaggaactggatattctgaaaaccgtaaaggaaatcacagggtttttgctgattcaggcttggcctgaaaacaggacggacctccatgcctttgagaacctagaaatcatacgcggcaggaccaagcaacatggtcagttttctcttgcagtcgtcagcctgaacataacatccttgggattacgctccctcaaggagataagtgatggagatgtgataatttcaggaaacaaaaatttgtgctatgcaaatacaataaactggaaaaaactgtttgggacctccggtcagaaaaccaaaattataagcaacagaggtgaaaacagctgcaaggccacaggccaggtctgccatgccttgtgctcccccgagggctgctggggcccggagcccagggactgcgtctcttgccggaatgtcagccgaggcagggaatgcgtggacaagtgcaaccttctggagggtgagccaagggagtttgtggagaactctgagtgcatacagtgccacccagagtgcctgcctcaggccatgaacatcacctgcacaggacggggaccagacaactgtatccagtgtgcccactacattgacggcccccactgcgtcaagacctgcccggcaggagtcatgggagaaaacaacaccctggtctggaagtacgcagacgccggccatgtgtgccacctgtgccatccaaactgcacctacggatgcactgggccaggtcttgaaggctgtccaacgaatgggcctaagatcccgtccatcgccactgggatggtgggggccctcctcttgctgctggtggtggccctggggatcggcctcttcatgcgaaggcgccacatcgttcggaagcgcacgctgcggaggctgctgcaggagagggagcttgtggagcctcttacacccagtggagaagctcccaaccaagctctcttgaggatcttgaaggaaactgaattcaaaaagatcaaagtgctgggctccggtgcgttcggcacggtgtataagggactctggatcccagaaggtgagaaagttaaaattcccgtcgctatcaaggaattaagagaagcaacatctccgaaagccaacaaggaaatcctcgatgaagcctacgtgatggccagcgtggacaacccccacgtgtgccgcctgctgggcatctgcctcacctccaccgtgcagctcatcacgcagctcatgcccttcggctgcctcctggactatgtccgggaacacaaagacaatattggctcccagtacctgctcaactggtgtgtgcagatcgcaaagggcatgaactacttggaggaccgtcgcttggtgcaccgcgacctggcagccaggaacgtactggtgaaaacaccgcagcatgtcaagatcacagattttgggctggccaaactgctgggtgcggaagagaaagaataccatgcagaaggaggcaaagtgcctatcaagtggatggcattggaatcaattttacacagaatctatacccaccagagtgatgtctggagctacggggtgaccgtttgggagttgatgacctttggatccaagccatatgacggaatccctgccagcgagatctcctccatcctggagaaaggagaacgcctccctcagccacccatatgtaccatcgatgtctacatgatcatggtcaagtgctggatgatagacgcagatagtcgcccaaagttccgtgagttgatcatcgaattctccaaaatggcccgagacccccagcgctaccttgtcattcagggggatgaaagaatgcatttgccaagtcctacagactccaacttctaccgtgccctgatggatgaagaagacatggacgacgtggtggatgccgacgagtacctcatcccacagcagggcttcttcagcagcccctccacgtcacggactcccctcctgagctctctgagtgcaaccagcaacaattccaccgtggcttgcattgatagaaatgggctgcaaagctgtcccatcaaggaagacagcttcttgcagcgatacagctcagaccccacaggcgccttgactgaggacagcatagacgacaccttcctcccagtgcctgaatacataaaccagtccgttcccaaaaggcccgctggctctgtgcagaatcctgtctatcacaatcagcctctgaaccccgcgcccagcagagacccacactaccaggacccccacagcactgcagtgggcaaccccgagtatctcaacactgtccagcccacctgtgtcaacagcacattcgacagccctgcccactgggcccagaaaggcagccaccaaattagcctggacaaccctgactaccagcaggacttctttcccaaggaagccaagccaaatggcatctttaagggctccacagctgaaaatgcagaatacctaagggtcgcgccacaaagcagtgaatttattggagca

SEQ ID NO: 371 - protein, 1186 aa, Artificial Sequence
  cynomolgus EGF-R extracellular domain with human EGF-R transmembrane and intracellular domain
LEEKKVCQGTSNKLTQLGTFEDHFLSLQRMFNNCEVVLGNLEITYVQRNYDLSFLKTIQEVAGYVLIALNTVERIPLENLQIIRGNMYYENSYALAVLSNYDANKTGLKELPMRNLQEILHGAVRFSNNPALCNVESIQWRDIVSSEFLSNMSMDFQNHLGSCQKCDPSCPNGSCWGAGEENCQKLTKIICAQQCSGRCRGKSPSDCCHNQCAAGCTGPRESDCLVCRKFRDEATCKDTCPPLMLYNPTTYQMDVNPEGKYSFGATCVKKCPRNYVVTDHGSCVRACGADSYEMEEDGVRKCKKCEGPCRKVCNGIGIGEFKDTLSINATNIKHFKNCTSISGDLHILPVAFRGDSFTHTPPLDPQELDILKTVKEITGFLLIQAWPENRTDLHAFENLEIIRGRTKQHGQFSLAVVSLNITSLGLRSLKEISDGDVIISGNKNLCYANTINWKKLFGTSSQKTKIISNRGENSCKATGQVCHALCSPEGCWGPEPRDCVSCQNVSRGRECVDKCNILEGEPREFVENSECIQCHPECLPQVMNITCTGRGPDNCIQCAHYIDGPHCVKTCPAGVMGENNTLVWKYADAGHVCHLCHPNCTYGCTGPGLEGCARNGPKIPSIATGMLGALLLLLVVALGIGLFMRRRHIVRKRTLRRLLQERELVEPLTPSGEAPNQALLRILKETEFKKIKVLGSGAFGTVYKGLWIPEGEKVKIPVAIKELREATSPKANKEILDEAYVMASVDNPHVCRLLGICLTSTVQLITQLMPFGCLLDYVREHKDNIGSQYLLNWCVQIAKGMNYLEDRRLVHRDLAARNVLVKTPQHVKITDFGLAKLLGAEEKEYHAEGGKVPIKWMALESILHRIYTHQSDVWSYGVTVWELMTFGSKPYDGIPASEISSILEKGERLPQPPICTIDVYMIMVKCWMIDADSRPKFRELIIEFSKMARDPQRYLVIQGDERMHLPSPTDSNFYRALMDEEDMDDVVDADEYLIPQQGFFSSPSTSRTPLLSSLSATSNNSTVACIDRNGLQSCPIKEDSFLQRYSSDPTGALTEDSIDDTFLPVPEYINQSVPKRPAGSVQNPVYHNQPLNPAPSRDPHYQDPHSTAVGNPEYLNTVQPTCVNSTFDSPAHWAQKGSHQISLDNPDYQQDFFPKEAKPNGIFKGSTAENAEYLRVAPQSSEFIGA

SEQ ID NO: 372 - DNA, 3630 bp, Artificial Sequence
  cynomolgus EGF-R extracellular domain with human EGF-R transmembrane and intracellular domain
  misc_feature (1185)..(1185): n is a, c, g, or t
  misc_feature (1554)..(1554): n is a, c, g, or t
atgcgaccctccgggacggccggggcagcgctcctggcgctgctggctgcgctctgcccggcgagtcgggctctggaggaaaagaaagtttgccaaggcacgagtaacaaactcacgcagttgggcacttttgaagatcattttctcagcctccagaggatgttcaataactgtgaggtggtccttgggaatttggaaattacctacgtgcagaggaattatgatctttccttcttaaagaccatccaggaggtggctggttatgtcctcatcgccctcaacacagtggagcggattcctttggaaaacctgcagatcatcagaggaaacatgtactatgaaaattcctatgccttagcagtcttatctaactatgatgcaaataaaaccggactgaaggagctgcccatgagaaacttacaggaaatcctgcatggcgccgtgcggttcagcaacaaccctgccctgtgcaacgtggagagcatccagtggcgggacatagtcagcagcgagtttctcagcaacatgtcgatggacttccagaaccacctgggcagctgccaaaagtgtgatccaagctgtcccaatgggagctgctggggtgcaggagaggagaactgccagaaactgaccaaaatcatctgtgcccagcagtgctccgggcgctgccgcggcaagtcccccagtgactgctgccacaaccagtgtgccgcgggctgcacgggcccccgggagagcgactgcctggtctgccgcaaattccgagacgaagccacgtgcaaggacacctgccccccactcatgctctacaaccccaccacataccagatggatgtgaaccccgagggcaaatacagctttggtgccacctgcgtgaagaagtgtccccgtaattatgtggtgacagatcacggctcgtgcgtccgagcctgcggggccgacagctatgagatggaggaagacggcgtccgcaagtgtaagaagtgcgaagggccttgccgcaaagtgtgtaatggaataggtattggtgaatttaaagacacactctccataaatgctacaaatattaaacacttcaaaaactgcacctccatcagtggcgatctccacatcctgccggtggcatttaggggtgactccttcacacacactccgcctctggatccacaggaactggatattctnaaaaccgtaaaggaaatcacagggtttttgctgattcaggcttggcctgaaaacaggacggacctccatgcttttgagaacctagaaatcatacgtggcaggaccaagcaacacggtcagttttctcttgcggtcgtcagcctgaacataacatccttgggattacgctccctcaaggagataagcgatggagatgtgataatttcaggaaacaaaaatttgtgctatgcaaatacaataaactggaaaaaactgtttgggacctccagtcagaaaaccaaaattataagcaacagaggtgaaaacagctgcaaggccacgggccaggtctgccatgccttgtgctcccccgagggctgctggggcccngagcccagggactgcgtctcctgccagaatgtcagccgaggcagagaatgcgtggacaagtgcaacatcctggagggcgagccaagggagtttgtggagaactctgagtgcatacagtgccacccagaatgcctgccccaggtcatgaacatcacctgcacaggacggggaccagacaactgtatccagtgtgcccactacattgacggcccccactgcgtcaagacctgcccagcaggagtcatgggagaaaacaacaccctggtctggaagtacgcagacgccggccacgtgtgccacctgtgccatccaaactgcacctacggatgcactgggccaggtcttgaaggctgtgcaaggaacgggcctaagatcccatccatcgccactggcatgctgggggccctcctcttgctgctggtggtggccctggggatcggcctcttcatgcgaaggcgccacatcgttcggaagcgcacgctgcggaggctgctgcaggagagggagcttgtggagcctcttacacccagtggagaagctcccaaccaagctctcttgaggatcttgaaggaaactgaattcaaaaagatcaaagtgctgggctccggtgcgttcggcacggtgtataagggactctggatcccagaaggtgagaaagttaaaattcccgtcgctatcaaggaattaagagaagcaacatctccgaaagccaacaaggaaatcctcgatgaagcctacgtgatggccagcgtggacaacccccacgtgtgccgcctgctgggcatctgcctcacctccaccgtgcagctcatcacgcagctcatgcccttcggctgcctcctggactatgtccgggaacacaaagacaatattggctcccagtacctgctcaactggtgtgtgcagatcgcaaagggcatgaactacttggaggaccgtcgcttggtgcaccgcgacctggcagccaggaacgtactggtgaaaacaccgcagcatgtcaagatcacagattttgggctggccaaactgctgggtgcggaagagaaagaataccatgcagaaggaggcaaagtgcctatcaagtggatggcattggaatcaattttacacagaatctatacccaccagagtgatgtctggagctacggggtgaccgtttgggagttgatgacctttggatccaagccatatgacggaatccctgccagcgagatctcctccatcctggagaaaggagaacgcctccctcagccacccatatgtaccatcgatgtctacatgatcatggtcaagtgctggatgatagacgcagatagtcgcccaaagttccgtgagttgatcatcgaattctccaaaatggcccgagacccccagcgctaccttgtcattcagggggatgaaagaatgcatttgccaagtcctacagactccaacttctaccgtgccctgatggatgaagaagacatggacgacgtggtggatgccgacgagtacctcatcccacagcagggcttcttcagcagcccctccacgtcacggactcccctcctgagctctctgagtgcaaccagcaacaattccaccgtggcttgcattgatagaaatgggctgcaaagctgtcccatcaaggaagacagcttcttgcagcgatacagctcagaccccacaggcgccttgactgaggacagcatagacgacaccttcctcccagtgcctgaatacataaaccagtccgttcccaaaaggcccgctggctctgtgcagaatcctgtctatcacaatcagcctctgaaccccgcgcccagcagagacccacactaccaggacccccacagcactgcagtgggcaaccccgagtatctcaacactgtccagcccacctgtgtcaacagcacattcgacagccctgcccactgggcccagaaaggcagccaccaaattagcctggacaaccctgactaccagcaggacttctttcccaaggaagccaagccaaatggcatctttaagggctccacagctgaaaatgcagaatacctaagggtcgcgccacaaagcagtgaatttattggagca

SEQ ID NO: 373 - protein, 800 aa, Homo sapiens
DYKDDDDKSRTRSGSQLDGGLVLFSHRGTLDGGFRFRLSDGEHTSPGHFFRVTAQKQVLLSLKGSQTLTVCPGSVQPLSSQTLRASSSAGTDPQLLLYRVVRGPQLGRLFHAQQDSTGEALVNFTQAEVYAGNILYEHEMPPEPFWEAHDTLELQLSSPPARDVAATLAVAVSFEAACPQRPSHLWKNKGLWVPEGQRARITVAALDASNLLASVPSPQRSEHDVLFQVTQFPSRGQLLVSEEPLHAGQPHFLQSQLAAGQLVYAHGGGGTQQDGFHFRAHLQGPAGASVAGPQTSEAFAITVRDVNERPPQPQASVPLRLTRGSRAPISRAQLSVVDPDSAPGEIEYEVQRAPHNGFLSLVGGGLGPVTRFTQADVDSGRLAFVANGSSVAGIFQLSMSDGASPPLPMSLAVDILPSAIEVQLRAPLEVPQALGRSSLSQQQLRVVSDREEPEAAYRLIQGPQYGHLLVGGRPTSAFSQFQIDQGEVVFAFTNSSSSHDHFRVLALARGVNASAVVNVTVRALLHVWAGGPWPQGATLRLDPTVLDAGELANRTDSVPRFRLLEGPRHGRVVRVPRARTEPGGSQLVEQFTQQDLEDGRLGLEVGRPEGRAPGPAGDSLTLELWAQGVPPAVASLDFATEPYNAARPYSVALLSVPEAARTEAGKPESSTPTGEPGPMASSPEPAVAKGGFLSFLEANMFSVIIPMCLVLLLLALILPLLFYLRKRNKTGKHDVQVLTAKPRNGLAGDTETFRKVEPGQAIPLTAVPGQGPPPGGQPDPELLQFCRTPNPALKNGQYWV

SEQ ID NO: 374 - DNA, 2457 bp, Homo sapiens
atgggatggagctgtatcatcctcttcttggtagcaacagctacaggtgtacactccgactacaaagacgatgacgacaagtcccgtacgagatctggatcccaattggacggcgggctcgtgctgttctcacacagaggaaccctggatggaggcttccgcttccgcctctctgacggcgagcacacttcccccggacacttcttccgagtgacggcccagaagcaagtgctcctctcgctgaagggcagccagacactgactgtctgcccagggtccgtccagccactcagcagtcagaccctcagggccagctccagcgcaggcactgacccccagctcctgctctaccgtgtggtgcggggcccccagctaggccggctgttccacgcccagcaggacagcacaggggaggccctggtgaacttcactcaggcagaggtctacgctgggaatattctgtatgagcatgagatgccccccgagcccttttgggaggcccatgataccctagagctccagctgtcctcgccgcctgcccgggacgtggccgccacccttgctgtggctgtgtcttttgaggctgcctgtccccagcgccccagccacctctggaagaacaaaggtctctgggtccccgagggccagcgggccaggatcaccgtggctgctctggatgcctccaatctcttggccagcgttccatcaccccagcgctcagagcatgatgtgctcttccaggtcacacagttccccagccgcggccagctgttggtgtccgaggagcccctccatgctgggcagccccacttcctgcagtcccagctggctgcagggcagctagtgtatgcccacggcggtgggggcacccagcaggatggcttccactttcgtgcccacctccaggggccagcaggggcctccgtggctggaccccaaacctcagaggcctttgccatcacggtgagggatgtaaatgagcggccccctcagccacaggcctctgtcccactccggctcacccgaggctctcgtgcccccatctcccgggcccagctgagtgtggtggacccagactcagctcctggggagattgagtacgaggtccagcgggcaccccacaacggcttcctcagcctggtgggtggtggcctggggcccgtgacccgcttcacgcaagccgatgtggattcagggcggctggccttcgtggccaacgggagcagcgtggcaggcatcttccagctgagcatgtctgatggggccagcccacccctgcccatgtccctggctgtggacatcctaccatccgccatcgaggtgcagctgcgggcacccctggaggtgccccaagctttggggcgctcctcactgagccagcagcagctccgggtggtttcagatcgggaggagccagaggcagcataccggttgatccagggaccccagtatgggcatctcctggtgggcgggcggcccacctcggccttcagccaattccagatagaccagggcgaggtggtctttgccttcaccaactcctcctcctctcatgaccacttcagagtcctggcactggctaggggtgtcaatgcatcagccgtagtgaacgtcactgtgagggctctgctgcatgtgtgggcaggtgggccatggccccagggtgccaccctgcgcctggaccccaccgtcctagatgctggcgagctggccaaccgcacagacagtgtgccgcgcttccgcctcctggagggaccccggcatggccgcgtggtccgcgtgccccgagccaggacggagcccgggggcagccagctggtggagcagttcactcagcaggaccttgaggacgggaggctggggctggaggtgggcaggccagaggggagggcccccggccccgcaggtgacagtctcactctggagctgtgggcacagggcgtcccgcctgctgtggcctccctggactttgccactgagccttacaatgctgcccggccctacagcgtggccctgctcagtgtccccgaggccgcccggacggaagcagggaagccagagagcagcacccccacaggcgagccaggccccatggcatccagccctgagcccgctgtggccaagggaggcttcctgagctttctagaggccaacatgttcagcgtcatcatccccatgtgcctggtacttctgctcctggcgctcatcctgcccctgctcttctacctccgaaaacgcaacaagacgggcaagcatgacgtccaggtcctgactgccaagccccgcaacggcctggctggtgacaccgagacctttcgcaaggtggagccaggccaggccatcccgctcacagctgtgcctggccaggggccccctccaggaggccagcctgacccagagctgctgcagttctgccggacacccaaccctgcccttaagaatggccagtactgggtg

SEQ ID NO: 375 - protein, 807 aa, Macaca fascicularis
  misc_feature (714)..(714): Xaa can be any naturally occurring amino acid
PSNGRVVLRAAPGTEVRSFTQAQLDGGLVLFSHRGTLDGGFRFGLSDGEHTSSGHFFRVTAQKQVLLSLEGSRTLTVCPGSVQPLSSQTLRASSSAGTDPQLLLYRVVRGPQLGRLFHAQQDSTGEALVNFTQAEVYAGNILYEHEMPTEPFWEAHDTLELQLSSPPARDVAATLAVAVSFEAACPQRPSHLWKNKGLWVPEGQRAKITMAALDASNLLASVPSSQRLEHDVLFQVTQFPSRGQLLVSEEPLHAGQPHFLQSQLAAGQLVYAHGGGGTQQDGFHFRAHLQGPAGATVAGPQTSEAFAITVRDVNERPPQPQASVPLRITRGSRAPISRAQLSVVDPDSAPGEIEYEVQRAPHNGFLSLVGGGPGPVNRFTQADVDSGRLAFVANGSSVAGVFQLSMSDGASPPLPMSLAVDILPSAIEVQLQAPLEVPQALGRSSLSQQQLRVVSDREEPEAAYRLIQGPKYGHLLVGGQPASAFSQLQIDQGEVVFAFTNFSSSHDHFRVLALARGVNASAVVNITVRALLHVWAGGPWPQGATLRLDPTILDAGELANRTGSVPRFRLLEGPRHGRVVRVPRARMEPGGSQLVEQFTQQDLEDGRLGLEVGRPEGRAPSPTGDSLTLELWAQGVPPAVASLDFATEPYNAARPYSVALLSVPEATRTEAGKPESSTPTGEPGPMASSPVPAVAKGGFLGFLEANMFSVIIPXCLVLLLLALILPLLFYLRKRNKTGKHDVQVLTAKPRNGLAGDTETFRKVEPGQAIPLTAVPGQGPPPGGQPDPELLQFCRTPNPALKNGQYWV

SEQ ID NO: 376 - DNA, 2421 bp, Macaca fascicularis
cccagcaacggacgggtagtgctgcgggcggcgccgggcaccgaggtgcgcagcttcacgcaggcccagctggatggcggactcgtgctgttctcacacagaggaaccctggatggaggcttccgcttcggcctctccgatggcgagcacacttcctctggacacttcttccgagtgacggcccagaagcaagtgctcctctcgctggagggcagccggacactgactgtctgcccagggtccgtgcagccactcagcagtcagaccctcagagccagctccagcgcaggcaccgacccccagctcctgctctaccgtgtggtgcggggcccccagctaggccggctgttccatgcccagcaggacagcacaggggaggccctggtgaacttcactcaggcagaggtctatgctgggaatattctgtatgagcatgagatgcccaccgagcccttctgggaggcccatgataccctagagctccagctgtcctcaccacctgcccgggacgtggctgccacccttgctgtggctgtgtcttttgaggctgcctgtccccagcgccccagccacctctggaagaacaaaggtctctgggtccccgagggccagcgggccaagatcaccatggctgccctggatgcctccaacctcttggccagcgttccatcatcccagcgcctagagcatgatgtgctcttccaggtcacgcagttccccagccggggccagctattggtgtctgaggagcccctccacgctgggcagccccacttcctgcagtcccagctggctgcagggcagctagtgtatgcccacggcggtgggggtacccaacaggatggcttccactttcgtgcccacctccaggggccagcaggggccaccgtggctggaccccaaacctcagaggcttttgccatcacggtgcgggatgtaaatgagcggccccctcagccacaggcctctgtcccactccggatcacccgaggctctcgagcccccatctcccgggcccagctgagtgtcgtggacccagactcagctcctggggagattgagtatgaggtccagcgggcaccccacaacggcttcctcagcctggtgggtggtggcccggggcccgtgaaccgcttcacgcaagccgatgtggattcggggcggctggccttcgtggccaacgggagcagcgtagcaggcgtcttccagctgagcatgtctgatggggccagcccaccgctgcccatgtccctggccgtggacatcctaccatccgccatcgaggtgcagctgcaggcacccctggaggtgccccaagctttggggcgctcctcactgagccagcagcagctccgggtggtttcagatagggaggagccagaggcagcataccgcctcatccagggaccaaagtacgggcatctcctggtgggtgggcagcccgcctcggccttcagccaactccagatagaccagggcgaggtggtctttgccttcaccaacttctcctcctctcatgaccacttcagagtcctggcactggctaggggtgtcaacgcatcagccgtagtgaacatcactgtgagggctctgctgcacgtgtgggcaggtgggccatggccccagggtgctaccctgcgcctggacccaaccatcctagatgctggcgagctggccaaccgcacaggcagtgtgccccgcttccgcctcctggagggaccccggcatggccgcgtggtccgtgtgccccgagccaggatggagcctgggggcagccagctggtggagcagttcactcagcaggaccttgaggatgggaggctggggctggaggtgggcaggccagagggaagggcccccagccccacaggcgacagtctcactctggagctgtgggcacagggcgtcccacctgctgtggcctccctggactttgccactgagccttacaatgctgcccggccctacagcgtggccctgctcagtgtccccgaggccacccggacggaagcagggaagccagagagcagcacccccacaggcgagccaggccccatggcatctagccctgtgcctgctgtggccaagggaggcttcctgggcttccttgaggccaacatgttcagtgtcatcatccccrtgtgcctggtccttctgctcctggcgctcatcttgcccctgctcttctacctccgaaaacgcaacaagacgggcaagcatgacgtccaggtcctgactgccaagccccgcaatggtctggctggtgacactgagacctttcgcaaggtggagccaggccaggccatcccgctcacagctgtgcctggccaggggccccctccgggaggccagcctgacccagagctgctgcagttctgccggacacccaaccctgcccttaagaatggccagtactgggtg

SEQ ID NO: 377 - DNA, 18 bp, Artificial Sequence
  PCR primer for CD3epsilon chain - forward primer
agagttctgggcctctgc

SEQ ID NO: 378 - DNA, 19 bp, Artificial Sequence
  PCR primer for CD3epsilon chain - reverse primer
cggatgggctcatagtctg

SEQ ID NO: 379 - protein, 192 aa, Artificial Sequence
  His6-human CD3epsilon
HHHHHHQDGNEEMGGITQTPYKVSISGTTVILTCPQYPGSEILWQHNDKNIGGDEDDKNIGSDEDHLSLKEFSELEQSGYYVCYPRGSKPEDANFYLYLRARVCENCMEMDVMSVATIVIVDICITGGLLLLVYYWSKNRKAKAKPVTRGAGAGGRQRGQNKERPPPVPNPDYEPIRKGQRDLYSGLNQRRI

SEQ ID NO: 380 - DNA, 633 bp, Artificial Sequence
  His6-human CD3epsilon
atgggatggagctgtatcatcctcttcttggtagcaacagctacaggtgtacactcccatcatcaccatcatcatcaagatggtaatgaagaaatgggtggtattacacagacaccatataaagtctccatctctggaaccacagtaatattgacatgccctcagtatcctggatctgaaatactatggcaacacaatgataaaaacataggcggtgatgaggatgataaaaacataggcagtgatgaggatcacctgtcactgaaggaattttcagaattggagcaaagtggttattatgtctgctaccccagaggaagcaaaccagaagatgcgaacttttatctctacctgagggcacgcgtgtgtgagaactgcatggagatggatgtgatgtcggtggccacaattgtcatagtggacatctgcatcactgggggcttgctgctgctggtttactactggagcaagaatagaaaggccaaggccaagcctgtgacacgaggagcgggtgctggcggcaggcaaaggggacaaaacaaggagaggccaccacctgttcccaacccagactatgagcccatccggaaaggccagcgggacctgtattctggcctgaatcagagacgcatc

SEQ ID NO: 381 - protein, 119 aa, Artificial Sequence [sequence omitted]

SEQ ID NO: 382 - DNA, 357 bp, Artificial Sequence
  VH of EGFR
caggtgcagctgcaggagtcgggcccaggactggtgaagccttcggagaccctgtccctcacctgcactgtctctggtggctccgtcagcagtggtgattactactggacctggatccggcagtccccagggaagggactggagtggattggacacatctattacagtgggaacaccaattataacccctccctcaagagccgactcaccatatcaattgacacgtccaagactcagttctccctgaagctgagttctgtgaccgctgcggacacggccatttattactgtgtgcgagatcgagtgactggtgcttttgatatctggggccaagggacaatggtcaccgtctcttcc

SEQ ID NO: 383 - protein, 107 aa, Artificial Sequence [sequence omitted]

SEQ ID NO: 384 - DNA, 321 bp, Artificial Sequence
  VL of EGFR
gacatccagatgacccagtctccatcctccctgtctgcatctgtcggagacagagtcaccatcacttgccaggcgagtcaggacatcagcaactatttaaattggtatcagcagaaaccagggaaagcccctaaactcctgatctacgatgcatccaatttggaaacaggggtcccatcaaggttcagtggaagtggatctgggacagattttactttcaccatcagcagcctgcagcctgaagatattgcaacatatttctgtcaacactttgatcatctcccgctcgctttcggcggagggaccaaggtggagatcaaa

SEQ ID NO: 385 - protein, 241 aa, Artificial Sequence
  VH-VL of EGFR
QVQLQESGPGLVKPSETLSLTCTVSGGSVSSGDYYWTWIRQSPGKGLEWIGHIYYSGNTNYNPSLKSRLTISIDTSKTQFSLKLSSVTAADTAIYYCVRDRVTGAFDIWGQGTMVTVSSGGGGSGGGGSGGGGSDIQMTQSPSSLSASVGDRVTITCQASQDISNYLNWYQQKPGKAPKLLIYDASNLETGVPSRFSGSGSGTDFTFTISSLQPEDIATYFCQHFDHLPLAFGGGTKVEIK

SEQ ID NO: 386 - DNA, 723 bp, Artificial Sequence
  VH-VL of EGFR
caggtgcagctgcaggagtcgggcccaggactggtgaagccttcggagaccctgtccctcacctgcactgtctctggtggctccgtcagcagtggtgattactactggacctggatccggcagtccccagggaagggactggagtggattggacacatctattacagtgggaacaccaattataacccctccctcaagagccgactcaccatatcaattgacacgtccaagactcagttctccctgaagctgagttctgtgaccgctgcggacacggccatttattactgtgtgcgagatcgagtgactggtgcttttgatatctggggccaagggacaatggtcaccgtctcttccggtggtggtggttctggcggcggcggctccggtggtggtggttctgacatccagatgacccagtctccatcctccctgtctgcatctgtcggagacagagtcaccatcacttgccaggcgagtcaggacatcagcaactatttaaattggtatcagcagaaaccagggaaagcccctaaactcctgatctacgatgcatccaatttggaaacaggggtcccatcaaggttcagtggaagtggatctgggacagattttactttcaccatcagcagcctgcagcctgaagatattgcaacatatttctgtcaacactttgatcatctcccgctcgctttcggcggagggaccaaggtggagatcaaa

SEQ ID NO: 387 - protein, 241 aa, Artificial Sequence
  VL-VH of EGFR
DIQMTQSPSSLSASVGDRVTITCQASQDISNYLNWYQQKPGKAPKLLIYDASNLETGVPSRFSGSGSGTDFTFTISSLQPEDIATYFCQHFDHLPLAFGGGTKVEIKGGGGSGGGGSGGGGSQVQLQESGPGLVKPSETLSLTCTVSGGSVSSGDYYWTWIRQSPGKGLEWIGHIYYSGNTNYNPSLKSRLTISIDTSKTQFSLKLSSVTAADTAIYYCVRDRVTGAFDIWGQGTMVTVSS

SEQ ID NO: 388 - DNA, 723 bp, Artificial Sequence
  VL-VH of EGFR
gacatccagatgacccagtctccatcctccctgtctgcatctgtcggagacagagtcaccatcacttgccaggcgagtcaggacatcagcaactatttaaattggtatcagcagaaaccagggaaagcccctaaactcctgatctacgatgcatccaatttggaaacaggggtcccatcaaggttcagtggaagtggatctgggacagattttactttcaccatcagcagcctgcagcctgaagatattgcaacatatttctgtcaacactttgatcatctcccgctcgctttcggcggagggaccaaggtggagatcaaaggtggtggtggttctggcggcggcggctccggtggtggtggttctcaggtgcagctgcaggagtcgggcccaggactggtgaagccttcggagaccctgtccctcacctgcactgtctctggtggctccgtcagcagtggtgattactactggacctggatccggcagtccccagggaagggactggagtggattggacacatctattacagtgggaacaccaattataacccctccctcaagagccgactcaccatatcaattgacacgtccaagactcagttctccctgaagctgagttctgtgaccgctgcggacacggccatttattactgtgtgcgagatcgagtgactggtgcttttgatatctggggccaagggacaatggtcaccgtctcttcc

SEQ ID NO: 389 - protein, 495 aa, Artificial Sequence
  EGFR VH-VL x I2C VH VL
QVQLQESGPGLVKPSETLSLTCTVSGGSVSSGDYYWTWIRQSPGKGLEWIGHIYYSGNTNYNPSLKSRLTISIDTSKTQFSLKLSSVTAADTAIYYCVRDRVTGAFDIWGQGTMVTVSSGGGGSGGGGSGGGGSDIQMTQSPSSLSASVGDRVTITCQASQDISNYLNWYQQKPGKAPKLLIYDASNLETGVPSRFSGSGSGTDFTFTISSLQPEDIATYFCQHFDHLPLAFGGGTKVEIKGGGGSEVQLVESGGGLVQPGGSLKLSCAASGFTFNKYAMNWVRQAPGKGLEWVARIRSKYNNYATYYADSVKDRFTISRDDSKNTAYLQMNNLKTEDTAVYYCVRHGNFGNSYISYWAYWGQGTLVTVSSGGGGSGGGGSGGGGSQTVVTQEPSLTVSPGGTVTLTCGSSTGAVTSGNYPNWVQQKPGQAPRGLIGGTKFLAPGTPARFSGSLLGGKAALTLSGVQPEDEAEYYCVLWYSNRWVFGGGTKLTVL

SEQ ID NO: 390 - DNA, 1485 bp, Artificial Sequence
  EGFR VH-VL x I2C VH VL
caggtgcagctgcaggagtcgggcccaggactggtgaagccttcggagaccctgtccctcacctgcactgtctctggtggctccgtcagcagtggtgattactactggacctggatccggcagtccccagggaagggactggagtggattggacacatctattacagtgggaacaccaattataacccctccctcaagagccgactcaccatatcaattgacacgtccaagactcagttctccctgaagctgagttctgtgaccgctgcggacacggccatttattactgtgtgcgagatcgagtgactggtgcttttgatatctggggccaagggacaatggtcaccgtctcttccggtggtggtggttctggcggcggcggctccggtggtggtggttctgacatccagatgacccagtctccatcctccctgtctgcatctgtcggagacagagtcaccatcacttgccaggcgagtcaggacatcagcaactatttaaattggtatcagcagaaaccagggaaagcccctaaactcctgatctacgatgcatccaatttggaaacaggggtcccatcaaggttcagtggaagtggatctgggacagattttactttcaccatcagcagcctgcagcctgaagatattgcaacatatttctgtcaacactttgatcatctcccgctcgctttcggcggagggaccaaggtggagatcaaaggaggtggtggatccgaggtgcagctggtcgagtctggaggaggattggtgcagcctggagggtcattgaaactctcatgtgcagcctctggattcaccttcaataagtacgccatgaactgggtccgccaggctccaggaaagggtttggaatgggttgctcgcataagaagtaaatataataattatgcaacatattatgccgattcagtgaaagacaggttcaccatctccagagatgattcaaaaaacactgcctatctacaaatgaacaacttgaagactgaggacactgccgtgtactactgtgtgagacatgggaacttcggtaatagctacatatcctactgggcttactggggccaagggactctggtcaccgtctcctcaggtggtggtggttctggcggcggcggctccggtggtggtggttctcagactgttgtgactcaggaaccttcactcaccgtatcacctggtggaacagtcacactcacttgtggctcctcgactggggctgttacatctggcaactacccaaactgggtccaacaaaaaccaggtcaggcaccccgtggtctaataggtgggactaagttcctcgcccccggtactcctgccagattctcaggctccctgcttggaggcaaggctgccctcaccctctcaggggtacagccagaggatgaggcagaatattactgtgttctatggtacagcaaccgctgggtgttcggtggaggaaccaaactgactgtccta

SEQ ID NO: 391 - protein, 495 aa, Artificial Sequence
  EGFR VL-VH x I2C VH VL
DIQMTQSPSSLSASVGDRVTITCQASQDISNYLNWYQQKPGKAPKLLIYDASNLETGVPSRFSGSGSGTDFTFTISSLQPEDIATYFCQHFDHLPLAFGGGTKVEIKGGGGSGGGGSGGGGSQVQLQESGPGLVKPSETLSLTCTVSGGSVSSGDYYWTWIRQSPGKGLEWIGHIYYSGNTNYNPSLKSRLTISIDTSKTQFSLKLSSVTAADTAIYYCVRDRVTGAFDIWGQGTMVTVSSGGGGSEVQLVESGGGLVQPGGSLKLSCAASGFTFNKYAMNWVRQAPGKGLEWVARIRSKYNNYATYYADSVKDRFTISRDDSKNTAYLQMNNLKTEDTAVYYCVRHGNFGNSYISYWAYWGQGTLVTVSSGGGGSGGGGSGGGGSQTVVTQEPSLTVSPGGTVTLTCGSSTGAVTSGNYPNWVQQKPGQAPRGLIGGTKFLAPGTPARFSGSLLGGKAALTLSGVQPEDEAEYYCVLWYSNRWVFGGGTKLTVL

SEQ ID NO: 392 - DNA, 1485 bp, Artificial Sequence
  EGFR VL-VH x I2C VH VL
gacatccagatgacccagtctccatcctccctgtctgcatctgtcggagacagagtcaccatcacttgccaggcgagtcaggacatcagcaactatttaaattggtatcagcagaaaccagggaaagcccctaaactcctgatctacgatgcatccaatttggaaacaggggtcccatcaaggttcagtggaagtggatctgggacagattttactttcaccatcagcagcctgcagcctgaagatattgcaacatatttctgtcaacactttgatcatctcccgctcgctttcggcggagggaccaaggtggagatcaaaggtggtggtggttctggcggcggcggctccggtggtggtggttctcaggtgcagctgcaggagtcgggcccaggactggtgaagccttcggagaccctgtccctcacctgcactgtctctggtggctccgtcagcagtggtgattactactggacctggatccggcagtccccagggaagggactggagtggattggacacatctattacagtgggaacaccaattataacccctccctcaagagccgactcaccatatcaattgacacgtccaagactcagttctccctgaagctgagttctgtgaccgctgcggacacggccatttattactgtgtgcgagatcgagtgactggtgcttttgatatctggggccaagggacaatggtcaccgtctcttccggaggtggtggatccgaggtgcagctggtcgagtctggaggaggattggtgcagcctggagggtcattgaaactctcatgtgcagcctctggattcaccttcaataagtacgccatgaactgggtccgccaggctccaggaaagggtttggaatgggttgctcgcataagaagtaaatataataattatgcaacatattatgccgattcagtgaaagacaggttcaccatctccagagatgattcaaaaaacactgcctatctacaaatgaacaacttgaagactgaggacactgccgtgtactactgtgtgagacatgggaacttcggtaatagctacatatcctactgggcttactggggccaagggactctggtcaccgtctcctcaggtggtggtggttctggcggcggcggctccggtggtggtggttctcagactgttgtgactcaggaaccttcactcaccgtatcacctggtggaacagtcacactcacttgtggctcctcgactggggctgttacatctggcaactacccaaactgggtccaacaaaaaccaggtcaggcaccccgtggtctaataggtgggactaagttcctcgcccccggtactcctgccagattctcaggctccctgcttggaggcaaggctgccctcaccctctcaggggtacagccagaggatgaggcagaatattactgtgttctatggtacagcaaccgctgggtgttcggtggaggaaccaaactgactgtccta

SEQ ID NO: 393 - protein, 495 aa, Artificial Sequence
  EGFR VH-VL x F12Q VH VL
QVQLQESGPGLVKPSETLSLTCTVSGGSVSSGDYYWTWIRQSPGKGLEWIGHIYYSGNTNYNPSLKSRLTISIDTSKTQFSLKLSSVTAADTAIYYCVRDRVTGAFDIWGQGTMVTVSSGGGGSGGGGSGGGGSDIQMTQSPSSLSASVGDRVTITCQASQDISNYLNWYQQKPGKAPKLLIYDASNLETGVPSRFSGSGSGTDFTFTISSLQPEDIATYFCQHFDHLPLAFGGGTKVEIKGGGGSEVQLVESGGGLVQPGGSLKLSCAASGFTFNSYAMNWVRQAPGKGLEWVARIRSKYNNYATYYADSVKGRFTISRDDSKNTAYLQMNNLKTEDTAVYYCVRHGNFGNSYVSWWAYWGQGTLVTVSSGGGGSGGGGSGGGGSQTVVTQEPSLTVSPGGTVTLTCGSSTGAVTSGNYPNWVQQKPGQAPRGLIGGTKFLAPGTPARFSGSLLGGKAALTLSGVQPEDEAEYYCVLWYSNRWVFGGGTKLTVL

SEQ ID NO: 394 - DNA, 1485 bp, Artificial Sequence
  EGFR VH-VL x F12Q  VH VL
caggtgcagctgcaggagtcgggcccaggactggtgaagccttcggagaccctgtccctcacctgcactgtctctggtggctccgtcagcagtggtgattactactggacctggatccggcagtccccagggaagggactggagtggattggacacatctattacagtgggaacaccaattataacccctccctcaagagccgactcaccatatcaattgacacgtccaagactcagttctccctgaagctgagttctgtgaccgctgcggacacggccatttattactgtgtgcgagatcgagtgactggtgcttttgatatctggggccaagggacaatggtcaccgtctcttccggtggtggtggttctggcggcggcggctccggtggtggtggttctgacatccagatgacccagtctccatcctccctgtctgcatctgtcggagacagagtcaccatcacttgccaggcgagtcaggacatcagcaactatttaaattggtatcagcagaaaccagggaaagcccctaaactcctgatctacgatgcatccaatttggaaacaggggtcccatcaaggttcagtggaagtggatctgggacagattttactttcaccatcagcagcctgcagcctgaagatattgcaacatatttctgtcaacactttgatcatctcccgctcgctttcggcggagggaccaaggtggagatcaaaggaggtggtggatccgaggtgcagctggtcgagtctggaggaggattggtgcagcctggagggtcattgaaactctcatgtgcagcctctggattcaccttcaatagctacgccatgaactgggtccgccaggctccaggaaagggtttggaatgggttgctcgcataagaagtaaatataataattatgcaacatattatgccgattcagtgaaaggcaggttcaccatctccagagatgattcaaaaaacactgcctatctacaaatgaacaacttgaaaactgaggacactgccgtgtactactgtgtgagacatgggaacttcggtaatagctacgtttcctggtgggcttactggggccaagggactctggtcaccgtctcctcaggtggtggtggttctggcggcggcggctccggtggtggtggttctcagactgttgtgactcaggaaccttcactcaccgtatcacctggtggaacagtcacactcacttgtggctcctcgactggggctgttacatctggcaactacccaaactgggtccaacaaaaaccaggtcaggcaccccgtggtctaataggtgggactaagttcctcgcccccggtactcctgccagattctcaggctccctgcttggaggcaaggctgccctcaccctctcaggggtacagccagaggatgaggcagaatattactgtgttctatggtacagcaaccgctgggtgttcggtggaggaaccaaactgactgtccta

SEQ ID NO: 395 - protein, 495 aa, Artificial Sequence
  EGFR VL-VH x F12Q  VH VL
DIQMTQSPSSLSASVGDRVTITCQASQDISNYLNWYQQKPGKAPKLLIYDASNLETGVPSRFSGSGSGTDFTFTISSLQPEDIATYFCQHFDHLPLAFGGGTKVEIKGGGGSGGGGSGGGGSQVQLQESGPGLVKPSETLSLTCTVSGGSVSSGDYYWTWIRQSPGKGLEWIGHIYYSGNTNYNPSLKSRLTISIDTSKTQFSLKLSSVTAADTAIYYCVRDRVTGAFDIWGQGTMVTVSSGGGGSEVQLVESGGGLVQPGGSLKLSCAASGFTFNSYAMNWVRQAPGKGLEWVARIRSKYNNYATYYADSVKGRFTISRDDSKNTAYLQMNNLKTEDTAVYYCVRHGNFGNSYVSWWAYWGQGTLVTVSSGGGGSGGGGSGGGGSQTVVTQEPSLTVSPGGTVTLTCGSSTGAVTSGNYPNWVQQKPGQAPRGLIGGTKFLAPGTPARFSGSLLGGKAALTLSGVQPEDEAEYYCVLWYSNRWVFGGGTKLTVL

SEQ ID NO: 396 - DNA, 1485 bp, Artificial Sequence
  EGFR VL-VH x F12Q  VH VL
gacatccagatgacccagtctccatcctccctgtctgcatctgtcggagacagagtcaccatcacttgccaggcgagtcaggacatcagcaactatttaaattggtatcagcagaaaccagggaaagcccctaaactcctgatctacgatgcatccaatttggaaacaggggtcccatcaaggttcagtggaagtggatctgggacagattttactttcaccatcagcagcctgcagcctgaagatattgcaacatatttctgtcaacactttgatcatctcccgctcgctttcggcggagggaccaaggtggagatcaaaggtggtggtggttctggcggcggcggctccggtggtggtggttctcaggtgcagctgcaggagtcgggcccaggactggtgaagccttcggagaccctgtccctcacctgcactgtctctggtggctccgtcagcagtggtgattactactggacctggatccggcagtccccagggaagggactggagtggattggacacatctattacagtgggaacaccaattataacccctccctcaagagccgactcaccatatcaattgacacgtccaagactcagttctccctgaagctgagttctgtgaccgctgcggacacggccatttattactgtgtgcgagatcgagtgactggtgcttttgatatctggggccaagggacaatggtcaccgtctcttccggaggtggtggatccgaggtgcagctggtcgagtctggaggaggattggtgcagcctggagggtcattgaaactctcatgtgcagcctctggattcaccttcaatagctacgccatgaactgggtccgccaggctccaggaaagggtttggaatgggttgctcgcataagaagtaaatataataattatgcaacatattatgccgattcagtgaaaggcaggttcaccatctccagagatgattcaaaaaacactgcctatctacaaatgaacaacttgaaaactgaggacactgccgtgtactactgtgtgagacatgggaacttcggtaatagctacgtttcctggtgggcttactggggccaagggactctggtcaccgtctcctcaggtggtggtggttctggcggcggcggctccggtggtggtggttctcagactgttgtgactcaggaaccttcactcaccgtatcacctggtggaacagtcacactcacttgtggctcctcgactggggctgttacatctggcaactacccaaactgggtccaacaaaaaccaggtcaggcaccccgtggtctaataggtgggactaagttcctcgcccccggtactcctgccagattctcaggctccctgcttggaggcaaggctgccctcaccctctcaggggtacagccagaggatgaggcagaatattactgtgttctatggtacagcaaccgctgggtgttcggtggaggaaccaaactgactgtccta

SEQ ID NO: 397 - protein, 495 aa, Artificial Sequence
  EGFR VH-VL x H2C VH VL
QVQLQESGPGLVKPSETLSLTCTVSGGSVSSGDYYWTWIRQSPGKGLEWIGHIYYSGNTNYNPSLKSRLTISIDTSKTQFSLKLSSVTAADTAIYYCVRDRVTGAFDIWGQGTMVTVSSGGGGSGGGGSGGGGSDIQMTQSPSSLSASVGDRVTITCQASQDISNYLNWYQQKPGKAPKLLIYDASNLETGVPSRFSGSGSGTDFTFTISSLQPEDIATYFCQHFDHLPLAFGGGTKVEIKGGGGSEVQLVESGGGLVQPGGSLKLSCAASGFTFNKYAMNWVRQAPGKGLEWVARIRSKYNNYATYYADSVKDRFTISRDDSKNTAYLQMNNLKTEDTAVYYCVRHGNFGNSYISYWAYWGQGTLVTVSSGGGGSGGGGSGGGGSQTVVTQEPSLTVSPGGTVTLTCGSSTGAVTSGYYPNWVQQKPGQAPRGLIGGTKFLAPGTPARFSGSLLGGKAALTLSGVQPEDEAEYYCALWYSNRWVFGGGTKLTVL

SEQ ID NO: 398 - DNA, 1485 bp, Artificial Sequence
  EGFR VH-VL x H2C  VH VL
caggtgcagctgcaggagtcgggcccaggactggtgaagccttcggagaccctgtccctcacctgcactgtctctggtggctccgtcagcagtggtgattactactggacctggatccggcagtccccagggaagggactggagtggattggacacatctattacagtgggaacaccaattataacccctccctcaagagccgactcaccatatcaattgacacgtccaagactcagttctccctgaagctgagttctgtgaccgctgcggacacggccatttattactgtgtgcgagatcgagtgactggtgcttttgatatctggggccaagggacaatggtcaccgtctcttccggtggtggtggttctggcggcggcggctccggtggtggtggttctgacatccagatgacccagtctccatcctccctgtctgcatctgtcggagacagagtcaccatcacttgccaggcgagtcaggacatcagcaactatttaaattggtatcagcagaaaccagggaaagcccctaaactcctgatctacgatgcatccaatttggaaacaggggtcccatcaaggttcagtggaagtggatctgggacagattttactttcaccatcagcagcctgcagcctgaagatattgcaacatatttctgtcaacactttgatcatctcccgctcgctttcggcggagggaccaaggtggagatcaaaggaggtggtggatccgaggtgcagctggtcgagtctggaggaggattggtgcagcctggagggtcattgaaactctcatgtgcagcctctggattcaccttcaataagtacgccatgaactgggtccgccaggctccaggaaagggtttggaatgggttgctcgcataagaagtaaatataataattatgcaacatattatgccgattcagtgaaagacaggttcaccatctccagagatgattcaaaaaacactgcctatctacaaatgaacaacttgaaaactgaggacactgccgtgtactactgtgtgagacatgggaacttcggtaatagctacatatcctactgggcttactggggccaagggactctggtcaccgtctcctcaggtggtggtggttctggcggcggcggctccggtggtggtggttctcagactgttgtgactcaggaaccttcactcaccgtatcacctggtggaacagtcacactcacttgtggctcctcgactggggctgttacatctggctactacccaaactgggtccaacaaaaaccaggtcaggcaccccgtggtctaataggtgggactaagttcctcgcccccggtactcctgccagattctcaggctccctgcttggaggcaaggctgccctcaccctctcaggggtacagccagaggatgaggcagaatattactgtgctctatggtacagcaaccgctgggtgttcggtggaggaaccaaactgactgtccta

SEQ ID NO: 399 - protein, 495 aa, Artificial Sequence
  EGFR VL-VH x H2C  VH VL
DIQMTQSPSSLSASVGDRVTITCQASQDISNYLNWYQQKPGKAPKLLIYDASNLETGVPSRFSGSGSGTDFTFTISSLQPEDIATYFCQHFDHLPLAFGGGTKVEIKGGGGSGGGGSGGGGSQVQLQESGPGLVKPSETLSLTCTVSGGSVSSGDYYWTWIRQSPGKGLEWIGHIYYSGNTNYNPSLKSRLTISIDTSKTQFSLKLSSVTAADTAIYYCVRDRVTGAFDIWGQGTMVTVSSGGGGSEVQLVESGGGLVQPGGSLKLSCAASGFTFNKYAMNWVRQAPGKGLEWVARIRSKYNNYATYYADSVKDRFTISRDDSKNTAYLQMNNLKTEDTAVYYCVRHGNFGNSYISYWAYWGQGTLVTVSSGGGGSGGGGSGGGGSQTVVTQEPSLTVSPGGTVTLTCGSSTGAVTSGYYPNWVQQKPGQAPRGLIGGTKFLAPGTPARFSGSLLGGKAALTLSGVQPEDEAEYYCALWYSNRWVFGGGTKLTVL

SEQ ID NO: 400 - DNA, 1485 bp, Artificial Sequence
  EGFR VL-VH x H2C  VH VL
gacatccagatgacccagtctccatcctccctgtctgcatctgtcggagacagagtcaccatcacttgccaggcgagtcaggacatcagcaactatttaaattggtatcagcagaaaccagggaaagcccctaaactcctgatctacgatgcatccaatttggaaacaggggtcccatcaaggttcagtggaagtggatctgggacagattttactttcaccatcagcagcctgcagcctgaagatattgcaacatatttctgtcaacactttgatcatctcccgctcgctttcggcggagggaccaaggtggagatcaaaggtggtggtggttctggcggcggcggctccggtggtggtggttctcaggtgcagctgcaggagtcgggcccaggactggtgaagccttcggagaccctgtccctcacctgcactgtctctggtggctccgtcagcagtggtgattactactggacctggatccggcagtccccagggaagggactggagtggattggacacatctattacagtgggaacaccaattataacccctccctcaagagccgactcaccatatcaattgacacgtccaagactcagttctccctgaagctgagttctgtgaccgctgcggacacggccatttattactgtgtgcgagatcgagtgactggtgcttttgatatctggggccaagggacaatggtcaccgtctcttccggaggtggtggatccgaggtgcagctggtcgagtctggaggaggattggtgcagcctggagggtcattgaaactctcatgtgcagcctctggattcaccttcaataagtacgccatgaactgggtccgccaggctccaggaaagggtttggaatgggttgctcgcataagaagtaaatataataattatgcaacatattatgccgattcagtgaaagacaggttcaccatctccagagatgattcaaaaaacactgcctatctacaaatgaacaacttgaaaactgaggacactgccgtgtactactgtgtgagacatgggaacttcggtaatagctacatatcctactgggcttactggggccaagggactctggtcaccgtctcctcaggtggtggtggttctggcggcggcggctccggtggtggtggttctcagactgttgtgactcaggaaccttcactcaccgtatcacctggtggaacagtcacactcacttgtggctcctcgactggggctgttacatctggctactacccaaactgggtccaacaaaaaccaggtcaggcaccccgtggtctaataggtgggactaagttcctcgcccccggtactcctgccagattctcaggctccctgcttggaggcaaggctgccctcaccctctcaggggtacagccagaggatgaggcagaatattactgtgctctatggtacagcaaccgctgggtgttcggtggaggaaccaaactgactgtccta

SEQ ID NO: 401 - protein, 119 aa, Artificial Sequence
  VH of EGFR
QVQLKQSGPGLVQPSQSLSITCTVSGFSLTNYGVHWVRQSPGKGLEWLGVIWSGGNTDYNTPFTSRLSINKDNSKSQVFFKMNSLQSNDTAIYYCARALTYYDYEFAYWGQGTLVTVSS

SEQ ID NO: 402 - DNA, 357 bp, Artificial Sequence
  VH of EGFR
caggtgcagctgaagcagtcaggacctggcctagtgcagccctcacagagcctgtccatcacctgcacagtctctggtttctcattaactaactatggagtacactgggttcgccagtctccaggaaagggtctggagtggctgggagtgatatggagtggtggaaacacagactataatacacctttcacatccagactgagcatcaacaaggacaattccaagagccaagttttctttaaaatgaacagtctgcaatctaatgacacagccatatattactgtgccagagccctgacctattatgactacgagttcgcctattggggtcagggaaccctggttaccgtgtcttcc

SEQ ID NO: 403 - protein, 107 aa, Artificial Sequence
  VL of EGFR
DILLTQSPVILSVSPGERVSFSCRASQSIGTNIHWYQQRTNGSPRLLIKYASESISGIPSRFSGSGSGTDFTLSINSVESEDIADYYCQQNNNWPTTFGAGTKLELK

SEQ ID NO: 404 - DNA, 321 bp, Artificial Sequence
  VL of EGFR
gacatcttgctgactcagtctccagtcatcctgtctgtgagtccaggagaaagagtcagtttctcctgcagggccagtcagagcattggcacaaacatacactggtatcagcaaagaacaaatggttctccaaggcttctcataaagtatgcttctgagtctatctctgggatcccttccaggtttagtggcagtggatcagggacagattttactcttagcatcaacagtgtggagtctgaagatattgcagattattactgtcaacaaaataataactggccaaccacatttggtgcaggaacaaagctggaactgaaa

SEQ ID NO: 405 - protein, 241 aa, Artificial Sequence
  VH-VL of EGFR
QVQLKQSGPGLVQPSQSLSITCTVSGFSLTNYGVHWVRQSPGKGLEWLGVIWSGGNTDYNTPFTSRLSINKDNSKSQVFFKMNSLQSNDTAIYYCARALTYYDYEFAYWGQGTLVTVSSGGGGSGGGGSGGGGSDILLTQSPVILSVSPGERVSFSCRASQSIGTNIHWYQQRTNGSPRLLIKYASESISGIPSRFSGSGSGTDFTLSINSVESEDIADYYCQQNNNWPTTFGAGTKLELK

SEQ ID NO: 406 - DNA, 723 bp, Artificial Sequence
  VH-VL of EGFR
caggtgcagctgaagcagtcaggacctggcctagtgcagccctcacagagcctgtccatcacctgcacagtctctggtttctcattaactaactatggagtacactgggttcgccagtctccaggaaagggtctggagtggctgggagtgatatggagtggtggaaacacagactataatacacctttcacatccagactgagcatcaacaaggacaattccaagagccaagttttctttaaaatgaacagtctgcaatctaatgacacagccatatattactgtgccagagccctgacctattatgactacgagttcgcctattggggtcagggaaccctggttaccgtgtcttccggtggtggtggttctggcggcggcggctccggtggtggtggttctgacatcttgctgactcagtctccagtcatcctgtctgtgagtccaggagaaagagtcagtttctcctgcagggccagtcagagcattggcacaaacatacactggtatcagcaaagaacaaatggttctccaaggcttctcataaagtatgcttctgagtctatctctgggatcccttccaggtttagtggcagtggatcagggacagattttactcttagcatcaacagtgtggagtctgaagatattgcagattattactgtcaacaaaataataactggccaaccacatttggtgcaggaacaaagctggaactgaaa

SEQ ID NO: 407 - protein, 241 aa, Artificial Sequence
  VL-VH of EGFR
DILLTQSPVILSVSPGERVSFSCRASQSIGTNIHWYQQRTNGSPRLLIKYASESISGIPSRFSGSGSGTDFTLSINSVESEDIADYYCQQNNNWPTTFGAGTKLELKGGGGSGGGGSGGGGSQVQLKQSGPGLVQPSQSLSITCTVSGFSLTNYGVHWVRQSPGKGLEWLGVIWSGGNTDYNTPFTSRLSINKDNSKSQVFFKMNSLQSNDTAIYYCARALTYYDYEFAYWGQGTLVTVSS

SEQ ID NO: 408 - DNA, 723 bp, Artificial Sequence
  VL-VH of EGFR
gacatcttgctgactcagtctccagtcatcctgtctgtgagtccaggagaaagagtcagtttctcctgcagggccagtcagagcattggcacaaacatacactggtatcagcaaagaacaaatggttctccaaggcttctcataaagtatgcttctgagtctatctctgggatcccttccaggtttagtggcagtggatcagggacagattttactcttagcatcaacagtgtggagtctgaagatattgcagattattactgtcaacaaaataataactggccaaccacatttggtgcaggaacaaagctggaactgaaaggtggtggtggttctggcggcggcggctccggtggtggtggttctcaggtgcagctgaagcagtcaggacctggcctagtgcagccctcacagagcctgtccatcacctgcacagtctctggtttctcattaactaactatggagtacactgggttcgccagtctccaggaaagggtctggagtggctgggagtgatatggagtggtggaaacacagactataatacacctttcacatccagactgagcatcaacaaggacaattccaagagccaagttttctttaaaatgaacagtctgcaatctaatgacacagccatatattactgtgccagagccctgacctattatgactacgagttcgcctattggggtcagggaaccctggttaccgtgtcttcc

SEQ ID NO: 409 - protein, 495 aa, Artificial Sequence
  EGFR VH-VL x I2C VH VL
QVQLKQSGPGLVQPSQSLSITCTVSGFSLTNYGVHWVRQSPGKGLEWLGVIWSGGNTDYNTPFTSRLSINKDNSKSQVFFKMNSLQSNDTAIYYCARALTYYDYEFAYWGQGTLVTVSSGGGGSGGGGSGGGGSDILLTQSPVILSVSPGERVSFSCRASQSIGTNIHWYQQRTNGSPRLLIKYASESISGIPSRFSGSGSGTDFTLSINSVESEDIADYYCQQNNNWPTTFGAGTKLELKGGGGSEVQLVESGGGLVQPGGSLKLSCAASGFTFNKYAMNWVRQAPGKGLEWVARIRSKYNNYATYYADSVKDRFTISRDDSKNTAYLQMNNLKTEDTAVYYCVRHGNFGNSYISYWAYWGQGTLVTVSSGGGGSGGGGSGGGGSQTVVTQEPSLTVSPGGTVTLTCGSSTGAVTSGNYPNWVQQKPGQAPRGLIGGTKFLAPGTPARFSGSLLGGKAALTLSGVQPEDEAEYYCVLWYSNRWVFGGGTKLTVL

SEQ ID NO: 410 - DNA, 1485 bp, Artificial Sequence
  EGFR VH-VL x I2C VH VL
caggtgcagctgaagcagtcaggacctggcctagtgcagccctcacagagcctgtccatcacctgcacagtctctggtttctcattaactaactatggagtacactgggttcgccagtctccaggaaagggtctggagtggctgggagtgatatggagtggtggaaacacagactataatacacctttcacatccagactgagcatcaacaaggacaattccaagagccaagttttctttaaaatgaacagtctgcaatctaatgacacagccatatattactgtgccagagccctgacctattatgactacgagttcgcctattggggtcagggaaccctggttaccgtgtcttccggtggtggtggttctggcggcggcggctccggtggtggtggttctgacatcttgctgactcagtctccagtcatcctgtctgtgagtccaggagaaagagtcagtttctcctgcagggccagtcagagcattggcacaaacatacactggtatcagcaaagaacaaatggttctccaaggcttctcataaagtatgcttctgagtctatctctgggatcccttccaggtttagtggcagtggatcagggacagattttactcttagcatcaacagtgtggagtctgaagatattgcagattattactgtcaacaaaataataactggccaaccacatttggtgcaggaacaaagctggaactgaaaggaggtggtggatccgaggtgcagctggtcgagtctggaggaggattggtgcagcctggagggtcattgaaactctcatgtgcagcctctggattcaccttcaataagtacgccatgaactgggtccgccaggctccaggaaagggtttggaatgggttgctcgcataagaagtaaatataataattatgcaacatattatgccgattcagtgaaagacaggttcaccatctccagagatgattcaaaaaacactgcctatctacaaatgaacaacttgaagactgaggacactgccgtgtactactgtgtgagacatgggaacttcggtaatagctacatatcctactgggcttactggggccaagggactctggtcaccgtctcctcaggtggtggtggttctggcggcggcggctccggtggtggtggttctcagactgttgtgactcaggaaccttcactcaccgtatcacctggtggaacagtcacactcacttgtggctcctcgactggggctgttacatctggcaactacccaaactgggtccaacaaaaaccaggtcaggcaccccgtggtctaataggtgggactaagttcctcgcccccggtactcctgccagattctcaggctccctgcttggaggcaaggctgccctcaccctctcaggggtacagccagaggatgaggcagaatattactgtgttctatggtacagcaaccgctgggtgttcggtggaggaaccaaactgactgtccta

SEQ ID NO: 411 - protein, 495 aa, Artificial Sequence
  EGFR VL-VH x I2C VH VL
DILLTQSPVILSVSPGERVSFSCRASQSIGTNIHWYQQRTNGSPRLLIKYASESISGIPSRFSGSGSGTDFTLSINSVESEDIADYYCQQNNNWPTTFGAGTKLELKGGGGSGGGGSGGGGSQVQLKQSGPGLVQPSQSLSITCTVSGFSLTNYGVHWVRQSPGKGLEWLGVIWSGGNTDYNTPFTSRLSINKDNSKSQVFFKMNSLQSNDTAIYYCARALTYYDYEFAYWGQGTLVTVSSGGGGSEVQLVESGGGLVQPGGSLKLSCAASGFTFNKYAMNWVRQAPGKGLEWVARIRSKYNNYATYYADSVKDRFTISRDDSKNTAYLQMNNLKTEDTAVYYCVRHGNFGNSYISYWAYWGQGTLVTVSSGGGGSGGGGSGGGGSQTVVTQEPSLTVSPGGTVTLTCGSSTGAVTSGNYPNWVQQKPGQAPRGLIGGTKFLAPGTPARFSGSLLGGKAALTLSGVQPEDEAEYYCVLWYSNRWVFGGGTKLTVL

SEQ ID NO: 412 - DNA, 1485 bp, Artificial Sequence
  EGFR VL-VH x I2C VH VL
gacatcttgctgactcagtctccagtcatcctgtctgtgagtccaggagaaagagtcagtttctcctgcagggccagtcagagcattggcacaaacatacactggtatcagcaaagaacaaatggttctccaaggcttctcataaagtatgcttctgagtctatctctgggatcccttccaggtttagtggcagtggatcagggacagattttactcttagcatcaacagtgtggagtctgaagatattgcagattattactgtcaacaaaataataactggccaaccacatttggtgcaggaacaaagctggaactgaaaggtggtggtggttctggcggcggcggctccggtggtggtggttctcaggtgcagctgaagcagtcaggacctggcctagtgcagccctcacagagcctgtccatcacctgcacagtctctggtttctcattaactaactatggagtacactgggttcgccagtctccaggaaagggtctggagtggctgggagtgatatggagtggtggaaacacagactataatacacctttcacatccagactgagcatcaacaaggacaattccaagagccaagttttctttaaaatgaacagtctgcaatctaatgacacagccatatattactgtgccagagccctgacctattatgactacgagttcgcctattggggtcagggaaccctggttaccgtgtcttccggaggtggtggatccgaggtgcagctggtcgagtctggaggaggattggtgcagcctggagggtcattgaaactctcatgtgcagcctctggattcaccttcaataagtacgccatgaactgggtccgccaggctccaggaaagggtttggaatgggttgctcgcataagaagtaaatataataattatgcaacatattatgccgattcagtgaaagacaggttcaccatctccagagatgattcaaaaaacactgcctatctacaaatgaacaacttgaagactgaggacactgccgtgtactactgtgtgagacatgggaacttcggtaatagctacatatcctactgggcttactggggccaagggactctggtcaccgtctcctcaggtggtggtggttctggcggcggcggctccggtggtggtggttctcagactgttgtgactcaggaaccttcactcaccgtatcacctggtggaacagtcacactcacttgtggctcctcgactggggctgttacatctggcaactacccaaactgggtccaacaaaaaccaggtcaggcaccccgtggtctaataggtgggactaagttcctcgcccccggtactcctgccagattctcaggctccctgcttggaggcaaggctgccctcaccctctcaggggtacagccagaggatgaggcagaatattactgtgttctatggtacagcaaccgctgggtgttcggtggaggaaccaaactgactgtccta

SEQ ID NO: 413 - protein, 495 aa, Artificial Sequence
  EGFR VH-VL x F12Q VH VL
QVQLKQSGPGLVQPSQSLSITCTVSGFSLTNYGVHWVRQSPGKGLEWLGVIWSGGNTDYNTPFTSRLSINKDNSKSQVFFKMNSLQSNDTAIYYCARALTYYDYEFAYWGQGTLVTVSSGGGGSGGGGSGGGGSDILLTQSPVILSVSPGERVSFSCRASQSIGTNIHWYQQRTNGSPRLLIKYASESISGIPSRFSGSGSGTDFTLSINSVESEDIADYYCQQNNNWPTTFGAGTKLELKGGGGSEVQLVESGGGLVQPGGSLKLSCAASGFTFNSYAMNWVRQAPGKGLEWVARIRSKYNNYATYYADSVKGRFTISRDDSKNTAYLQMNNLKTEDTAVYYCVRHGNFGNSYVSWWAYWGQGTLVTVSSGGGGSGGGGSGGGGSQTVVTQEPSLTVSPGGTVTLTCGSSTGAVTSGNYPNWVQQKPGQAPRGLIGGTKFLAPGTPARFSGSLLGGKAALTLSGVQPEDEAEYYCVLWYSNRWVFGGGTKLTVL

SEQ ID NO: 414 - DNA, 1485 bp, Artificial Sequence
  EGFR VH-VL x F12Q  VH VL
caggtgcagctgaagcagtcaggacctggcctagtgcagccctcacagagcctgtccatcacctgcacagtctctggtttctcattaactaactatggagtacactgggttcgccagtctccaggaaagggtctggagtggctgggagtgatatggagtggtggaaacacagactataatacacctttcacatccagactgagcatcaacaaggacaattccaagagccaagttttctttaaaatgaacagtctgcaatctaatgacacagccatatattactgtgccagagccctgacctattatgactacgagttcgcctattggggtcagggaaccctggttaccgtgtcttccggtggtggtggttctggcggcggcggctccggtggtggtggttctgacatcttgctgactcagtctccagtcatcctgtctgtgagtccaggagaaagagtcagtttctcctgcagggccagtcagagcattggcacaaacatacactggtatcagcaaagaacaaatggttctccaaggcttctcataaagtatgcttctgagtctatctctgggatcccttccaggtttagtggcagtggatcagggacagattttactcttagcatcaacagtgtggagtctgaagatattgcagattattactgtcaacaaaataataactggccaaccacatttggtgcaggaacaaagctggaactgaaaggaggtggtggatccgaggtgcagctggtcgagtctggaggaggattggtgcagcctggagggtcattgaaactctcatgtgcagcctctggattcaccttcaatagctacgccatgaactgggtccgccaggctccaggaaagggtttggaatgggttgctcgcataagaagtaaatataataattatgcaacatattatgccgattcagtgaaaggcaggttcaccatctccagagatgattcaaaaaacactgcctatctacaaatgaacaacttgaaaactgaggacactgccgtgtactactgtgtgagacatgggaacttcggtaatagctacgtttcctggtgggcttactggggccaagggactctggtcaccgtctcctcaggtggtggtggttctggcggcggcggctccggtggtggtggttctcagactgttgtgactcaggaaccttcactcaccgtatcacctggtggaacagtcacactcacttgtggctcctcgactggggctgttacatctggcaactacccaaactgggtccaacaaaaaccaggtcaggcaccccgtggtctaataggtgggactaagttcctcgcccccggtactcctgccagattctcaggctccctgcttggaggcaaggctgccctcaccctctcaggggtacagccagaggatgaggcagaatattactgtgttctatggtacagcaaccgctgggtgttcggtggaggaaccaaactgactgtccta

SEQ ID NO: 415 - protein, 495 aa, Artificial Sequence
  EGFR VL-VH x F12Q  VH VL
DILLTQSPVILSVSPGERVSFSCRASQSIGTNIHWYQQRTNGSPRLLIKYASESISGIPSRFSGSGSGTDFTLSINSVESEDIADYYCQQNNNWPTTFGAGTKLELKGGGGSGGGGSGGGGSQVQLKQSGPGLVQPSQSLSITCTVSGFSLTNYGVHWVRQSPGKGLEWLGVIWSGGNTDYNTPFTSRLSINKDNSKSQVFFKMNSLQSNDTAIYYCARALTYYDYEFAYWGQGTLVTVSSGGGGSEVQLVESGGGLVQPGGSLKLSCAASGFTFNSYAMNWVRQAPGKGLEWVARIRSKYNNYATYYADSVKGRFTISRDDSKNTAYLQMNNLKTEDTAVYYCVRHGNFGNSYVSWWAYWGQGTLVTVSSGGGGSGGGGSGGGGSQTVVTQEPSLTVSPGGTVTLTCGSSTGAVTSGNYPNWVQQKPGQAPRGLIGGTKFLAPGTPARFSGSLLGGKAALTLSGVQPEDEAEYYCVLWYSNRWVFGGGTKLTVL

SEQ ID NO: 416 - DNA, 1485 bp, Artificial Sequence
  EGFR VL-VH x F12Q  VH VL
gacatcttgctgactcagtctccagtcatcctgtctgtgagtccaggagaaagagtcagtttctcctgcagggccagtcagagcattggcacaaacatacactggtatcagcaaagaacaaatggttctccaaggcttctcataaagtatgcttctgagtctatctctgggatcccttccaggtttagtggcagtggatcagggacagattttactcttagcatcaacagtgtggagtctgaagatattgcagattattactgtcaacaaaataataactggccaaccacatttggtgcaggaacaaagctggaactgaaaggtggtggtggttctggcggcggcggctccggtggtggtggttctcaggtgcagctgaagcagtcaggacctggcctagtgcagccctcacagagcctgtccatcacctgcacagtctctggtttctcattaactaactatggagtacactgggttcgccagtctccaggaaagggtctggagtggctgggagtgatatggagtggtggaaacacagactataatacacctttcacatccagactgagcatcaacaaggacaattccaagagccaagttttctttaaaatgaacagtctgcaatctaatgacacagccatatattactgtgccagagccctgacctattatgactacgagttcgcctattggggtcagggaaccctggttaccgtgtcttccggaggtggtggatccgaggtgcagctggtcgagtctggaggaggattggtgcagcctggagggtcattgaaactctcatgtgcagcctctggattcaccttcaatagctacgccatgaactgggtccgccaggctccaggaaagggtttggaatgggttgctcgcataagaagtaaatataataattatgcaacatattatgccgattcagtgaaaggcaggttcaccatctccagagatgattcaaaaaacactgcctatctacaaatgaacaacttgaaaactgaggacactgccgtgtactactgtgtgagacatgggaacttcggtaatagctacgtttcctggtgggcttactggggccaagggactctggtcaccgtctcctcaggtggtggtggttctggcggcggcggctccggtggtggtggttctcagactgttgtgactcaggaaccttcactcaccgtatcacctggtggaacagtcacactcacttgtggctcctcgactggggctgttacatctggcaactacccaaactgggtccaacaaaaaccaggtcaggcaccccgtggtctaataggtgggactaagttcctcgcccccggtactcctgccagattctcaggctccctgcttggaggcaaggctgccctcaccctctcaggggtacagccagaggatgaggcagaatattactgtgttctatggtacagcaaccgctgggtgttcggtggaggaaccaaactgactgtccta

SEQ ID NO: 417 - protein, 495 aa, Artificial Sequence
  EGFR VH-VL x H2C VH VL
QVQLKQSGPGLVQPSQSLSITCTVSGFSLTNYGVHWVRQSPGKGLEWLGVIWSGGNTDYNTPFTSRLSINKDNSKSQVFFKMNSLQSNDTAIYYCARALTYYDYEFAYWGQGTLVTVSSGGGGSGGGGSGGGGSDILLTQSPVILSVSPGERVSFSCRASQSIGTNIHWYQQRTNGSPRLLIKYASESISGIPSRFSGSGSGTDFTLSINSVESEDIADYYCQQNNNWPTTFGAGTKLELKGGGGSEVQLVESGGGLVQPGGSLKLSCAASGFTFNKYAMNWVRQAPGKGLEWVARIRSKYNNYATYYADSVKDRFTISRDDSKNTAYLQMNNLKTEDTAVYYCVRHGNFGNSYISYWAYWGQGTLVTVSSGGGGSGGGGSGGGGSQTVVTQEPSLTVSPGGTVTLTCGSSTGAVTSGYYPNWVQQKPGQAPRGLIGGTKFLAPGTPARFSGSLLGGKAALTLSGVQPEDEAEYYCALWYSNRWVFGGGTKLTVL

SEQ ID NO: 418 - DNA, 1485 bp, Artificial Sequence
  EGFR VH-VL x H2C  VH VL
caggtgcagctgaagcagtcaggacctggcctagtgcagccctcacagagcctgtccatcacctgcacagtctctggtttctcattaactaactatggagtacactgggttcgccagtctccaggaaagggtctggagtggctgggagtgatatggagtggtggaaacacagactataatacacctttcacatccagactgagcatcaacaaggacaattccaagagccaagttttctttaaaatgaacagtctgcaatctaatgacacagccatatattactgtgccagagccctgacctattatgactacgagttcgcctattggggtcagggaaccctggttaccgtgtcttccggtggtggtggttctggcggcggcggctccggtggtggtggttctgacatcttgctgactcagtctccagtcatcctgtctgtgagtccaggagaaagagtcagtttctcctgcagggccagtcagagcattggcacaaacatacactggtatcagcaaagaacaaatggttctccaaggcttctcataaagtatgcttctgagtctatctctgggatcccttccaggtttagtggcagtggatcagggacagattttactcttagcatcaacagtgtggagtctgaagatattgcagattattactgtcaacaaaataataactggccaaccacatttggtgcaggaacaaagctggaactgaaaggaggtggtggatccgaggtgcagctggtcgagtctggaggaggattggtgcagcctggagggtcattgaaactctcatgtgcagcctctggattcaccttcaataagtacgccatgaactgggtccgccaggctccaggaaagggtttggaatgggttgctcgcataagaagtaaatataataattatgcaacatattatgccgattcagtgaaagacaggttcaccatctccagagatgattcaaaaaacactgcctatctacaaatgaacaacttgaaaactgaggacactgccgtgtactactgtgtgagacatgggaacttcggtaatagctacatatcctactgggcttactggggccaagggactctggtcaccgtctcctcaggtggtggtggttctggcggcggcggctccggtggtggtggttctcagactgttgtgactcaggaaccttcactcaccgtatcacctggtggaacagtcacactcacttgtggctcctcgactggggctgttacatctggctactacccaaactgggtccaacaaaaaccaggtcaggcaccccgtggtctaataggtgggactaagttcctcgcccccggtactcctgccagattctcaggctccctgcttggaggcaaggctgccctcaccctctcaggggtacagccagaggatgaggcagaatattactgtgctctatggtacagcaaccgctgggtgttcggtggaggaaccaaactgactgtccta

SEQ ID NO: 419 - protein, 495 aa, Artificial Sequence
  EGFR VL-VH x H2C  VH VL
DILLTQSPVILSVSPGERVSFSCRASQSIGTNIHWYQQRTNGSPRLLIKYASESISGIPSRFSGSGSGTDFTLSINSVESEDIADYYCQQNNNWPTTFGAGTKLELKGGGGSGGGGSGGGGSQVQLKQSGPGLVQPSQSLSITCTVSGFSLTNYGVHWVRQSPGKGLEWLGVIWSGGNTDYNTPFTSRLSINKDNSKSQVFFKMNSLQSNDTAIYYCARALTYYDYEFAYWGQGTLVTVSSGGGGSEVQLVESGGGLVQPGGSLKLSCAASGFTFNKYAMNWVRQAPGKGLEWVARIRSKYNNYATYYADSVKDRFTISRDDSKNTAYLQMNNLKTEDTAVYYCVRHGNFGNSYISYWAYWGQGTLVTVSSGGGGSGGGGSGGGGSQTVVTQEPSLTVSPGGTVTLTCGSSTGAVTSGYYPNWVQQKPGQAPRGLIGGTKFLAPGTPARFSGSLLGGKAALTLSGVQPEDEAEYYCALWYSNRWVFGGGTKLTVL

SEQ ID NO: 420 - DNA, 1485 bp, Artificial Sequence
  EGFR VL-VH x H2C  VH VL
gacatcttgctgactcagtctccagtcatcctgtctgtgagtccaggagaaagagtcagtttctcctgcagggccagtcagagcattggcacaaacatacactggtatcagcaaagaacaaatggttctccaaggcttctcataaagtatgcttctgagtctatctctgggatcccttccaggtttagtggcagtggatcagggacagattttactcttagcatcaacagtgtggagtctgaagatattgcagattattactgtcaacaaaataataactggccaaccacatttggtgcaggaacaaagctggaactgaaaggtggtggtggttctggcggcggcggctccggtggtggtggttctcaggtgcagctgaagcagtcaggacctggcctagtgcagccctcacagagcctgtccatcacctgcacagtctctggtttctcattaactaactatggagtacactgggttcgccagtctccaggaaagggtctggagtggctgggagtgatatggagtggtggaaacacagactataatacacctttcacatccagactgagcatcaacaaggacaattccaagagccaagttttctttaaaatgaacagtctgcaatctaatgacacagccatatattactgtgccagagccctgacctattatgactacgagttcgcctattggggtcagggaaccctggttaccgtgtcttccggaggtggtggatccgaggtgcagctggtcgagtctggaggaggattggtgcagcctggagggtcattgaaactctcatgtgcagcctctggattcaccttcaataagtacgccatgaactgggtccgccaggctccaggaaagggtttggaatgggttgctcgcataagaagtaaatataataattatgcaacatattatgccgattcagtgaaagacaggttcaccatctccagagatgattcaaaaaacactgcctatctacaaatgaacaacttgaaaactgaggacactgccgtgtactactgtgtgagacatgggaacttcggtaatagctacatatcctactgggcttactggggccaagggactctggtcaccgtctcctcaggtggtggtggttctggcggcggcggctccggtggtggtggttctcagactgttgtgactcaggaaccttcactcaccgtatcacctggtggaacagtcacactcacttgtggctcctcgactggggctgttacatctggctactacccaaactgggtccaacaaaaaccaggtcaggcaccccgtggtctaataggtgggactaagttcctcgcccccggtactcctgccagattctcaggctccctgcttggaggcaaggctgccctcaccctctcaggggtacagccagaggatgaggcagaatattactgtgctctatggtacagcaaccgctgggtgttcggtggaggaaccaaactgactgtccta

SEQ ID NO: 421 - protein, 120 aa, Artificial Sequence [sequence omitted]

SEQ ID NO: 422 - DNA, 360 bp, Artificial Sequence
  VH of Her2/neu
gaggttcagctggtggagtctggcggtggcctggtgcagccagggggctcactccgtttgtcctgtgcagcttctggcttcaacattaaagacacctatatacactgggtgcgtcaggccccgggtaagggcctggaatgggttgcaaggatttatcctacgaatggttatactagatatgccgatagcgtcaagggccgtttcactataagcgcagacacatccaaaaacacagcctacctgcagatgaacagcctgcgtgctgaggacactgccgtctattattgttctaggtggggaggggacggcttctatgctatggactattggggtcaaggaaccctggtcactgtctcctcc

SEQ ID NO: 423 - protein, 107 aa, Artificial Sequence [sequence omitted]

SEQ ID NO: 424 - DNA, 321 bp, Artificial Sequence
  VL of Her2/neu
gatatccagatgacccagtccccgagctccctgtccgcctctgtgggcgatagggtcaccatcacctgccgtgccagtcaggatgtgaatactgctgtagcctggtatcaacagaaaccaggaaaagctccgaaactactgatttactcggcatccttcctctactctggagtcccttctcgcttctctggatccagatctgggacggatttcactctgaccatcagcagtctgcagccggaagacttcgcaacttattactgtcagcaacattatactactcctcccacgttcggacagggtaccaaggtggagatcaaa

SEQ ID NO: 425 - protein, 242 aa, Artificial Sequence
  VH-VL of Her2/neu
EVQLVESGGGLVQPGGSLRLSCAASGFNIKDTYIHWVRQAPGKGLEWVARIYPTNGYTRYADSVKGRFTISADTSKNTAYLQMNSLRAEDTAVYYCSRWGGDGFYAMDYWGQGTLVTVSSGGGGSGGGGSGGGGSDIQMTQSPSSLSASVGDRVTITCRASQDVNTAVAWYQQKPGKAPKLLIYSASFLYSGVPSRFSGSRSGTDFTLTISSLQPEDFATYYCQQHYTTPPTFGQGTKVEIK

SEQ ID NO: 426 - DNA, 726 bp, Artificial Sequence
  VH-VL of Her2/neu
gaggttcagctggtggagtctggcggtggcctggtgcagccagggggctcactccgtttgtcctgtgcagcttctggcttcaacattaaagacacctatatacactgggtgcgtcaggccccgggtaagggcctggaatgggttgcaaggatttatcctacgaatggttatactagatatgccgatagcgtcaagggccgtttcactataagcgcagacacatccaaaaacacagcctacctgcagatgaacagcctgcgtgctgaggacactgccgtctattattgttctaggtggggaggggacggcttctatgctatggactattggggtcaaggaaccctggtcactgtctcctccggtggtggtggttctggcggcggcggctccggtggtggtggttctgatatccagatgacccagtccccgagctccctgtccgcctctgtgggcgatagggtcaccatcacctgccgtgccagtcaggatgtgaatactgctgtagcctggtatcaacagaaaccaggaaaagctccgaaactactgatttactcggcatccttcctctactctggagtcccttctcgcttctctggatccagatctgggacggatttcactctgaccatcagcagtctgcagccggaagacttcgcaacttattactgtcagcaacattatactactcctcccacgttcggacagggtaccaaggtggagatcaaa

SEQ ID NO: 427 - protein, 242 aa, Artificial Sequence
  VL-VH of Her2/neu
DIQMTQSPSSLSASVGDRVTITCRASQDVNTAVAWYQQKPGKAPKLLIYSASFLYSGVPSRFSGSRSGTDFTLTISSLQPEDFATYYCQQHYTTPPTFGQGTKVEIKGGGGSGGGGSGGGGSEVQLVESGGGLVQPGGSLRLSCAASGFNIKDTYIHWVRQAPGKGLEWVARIYPTNGYTRYADSVKGRFTISADTSKNTAYLQMNSLRAEDTAVYYCSRWGGDGFYAMDYWGQGTLVTVSS

SEQ ID NO: 428 - DNA, 726 bp, Artificial Sequence
  VL-VH of Her2/neu
gatatccagatgacccagtccccgagctccctgtccgcctctgtgggcgatagggtcaccatcacctgccgtgccagtcaggatgtgaatactgctgtagcctggtatcaacagaaaccaggaaaagctccgaaactactgatttactcggcatccttcctctactctggagtcccttctcgcttctctggatccagatctgggacggatttcactctgaccatcagcagtctgcagccggaagacttcgcaacttattactgtcagcaacattatactactcctcccacgttcggacagggtaccaaggtggagatcaaaggtggtggtggttctggcggcggcggctccggtggtggtggttctgaggttcagctggtggagtctggcggtggcctggtgcagccagggggctcactccgtttgtcctgtgcagcttctggcttcaacattaaagacacctatatacactgggtgcgtcaggccccgggtaagggcctggaatgggttgcaaggatttatcctacgaatggttatactagatatgccgatagcgtcaagggccgtttcactataagcgcagacacatccaaaaacacagcctacctgcagatgaacagcctgcgtgctgaggacactgccgtctattattgttctaggtggggaggggacggcttctatgctatggactattggggtcaaggaaccctggtcactgtctcctcc

SEQ ID NO: 429 - protein, 496 aa, Artificial Sequence
  Her2/neu VH-VL x I2C VH VL
EVQLVESGGGLVQPGGSLRLSCAASGFNIKDTYIHWVRQAPGKGLEWVARIYPTNGYTRYADSVKGRFTISADTSKNTAYLQMNSLRAEDTAVYYCSRWGGDGFYAMDYWGQGTLVTVSSGGGGSGGGGSGGGGSDIQMTQSPSSLSASVGDRVTITCRASQDVNTAVAWYQQKPGKAPKLLIYSASFLYSGVPSRFSGSRSGTDFTLTISSLQPEDFATYYCQQHYTTPPTFGQGTKVEIKGGGGSEVQLVESGGGLVQPGGSLKLSCAASGFTFNKYAMNWVRQAPGKGLEWVARIRSKYNNYATYYADSVKDRFTISRDDSKNTAYLQMNNLKTEDTAVYYCVRHGNFGNSYISYWAYWGQGTLVTVSSGGGGSGGGGSGGGGSQTVVTQEPSLTVSPGGTVTLTCGSSTGAVTSGNYPNWVQQKPGQAPRGLIGGTKFLAPGTPARFSGSLLGGKAALTLSGVQPEDEAEYYCVLWYSNRWVFGGGTKLTVL

SEQ ID NO: 430 - DNA, 1488 bp, Artificial Sequence
  Her2/neu VH-VL x I2C VH VL
gaggttcagctggtggagtctggcggtggcctggtgcagccagggggctcactccgtttgtcctgtgcagcttctggcttcaacattaaagacacctatatacactgggtgcgtcaggccccgggtaagggcctggaatgggttgcaaggatttatcctacgaatggttatactagatatgccgatagcgtcaagggccgtttcactataagcgcagacacatccaaaaacacagcctacctgcagatgaacagcctgcgtgctgaggacactgccgtctattattgttctaggtggggaggggacggcttctatgctatggactattggggtcaaggaaccctggtcactgtctcctccggtggtggtggttctggcggcggcggctccggtggtggtggttctgatatccagatgacccagtccccgagctccctgtccgcctctgtgggcgatagggtcaccatcacctgccgtgccagtcaggatgtgaatactgctgtagcctggtatcaacagaaaccaggaaaagctccgaaactactgatttactcggcatccttcctctactctggagtcccttctcgcttctctggatccagatctgggacggatttcactctgaccatcagcagtctgcagccggaagacttcgcaacttattactgtcagcaacattatactactcctcccacgttcggacagggtaccaaggtggagatcaaaggaggtggtggatccgaggtgcagctggtcgagtctggaggaggattggtgcagcctggagggtcattgaaactctcatgtgcagcctctggattcaccttcaataagtacgccatgaactgggtccgccaggctccaggaaagggtttggaatgggttgctcgcataagaagtaaatataataattatgcaacatattatgccgattcagtgaaagacaggttcaccatctccagagatgattcaaaaaacactgcctatctacaaatgaacaacttgaagactgaggacactgccgtgtactactgtgtgagacatgggaacttcggtaatagctacatatcctactgggcttactggggccaagggactctggtcaccgtctcctcaggtggtggtggttctggcggcggcggctccggtggtggtggttctcagactgttgtgactcaggaaccttcactcaccgtatcacctggtggaacagtcacactcacttgtggctcctcgactggggctgttacatctggcaactacccaaactgggtccaacaaaaaccaggtcaggcaccccgtggtctaataggtgggactaagttcctcgcccccggtactcctgccagattctcaggctccctgcttggaggcaaggctgccctcaccctctcaggggtacagccagaggatgaggcagaatattactgtgttctatggtacagcaaccgctgggtgttcggtggaggaaccaaactgactgtccta

SEQ ID NO: 431 - protein, 496 aa, Artificial Sequence
  Her2/neu VL-VH x I2C VH VL
DIQMTQSPSSLSASVGDRVTITCRASQDVNTAVAWYQQKPGKAPKLLIYSASFLYSGVPSRFSGSRSGTDFTLTISSLQPEDFATYYCQQHYTTPPTFGQGTKVEIKGGGGSGGGGSGGGGSEVQLVESGGGLVQPGGSLRLSCAASGFNIKDTYIHWVRQAPGKGLEWVARIYPTNGYTRYADSVKGRFTISADTSKNTAYLQMNSLRAEDTAVYYCSRWGGDGFYAMDYWGQGTLVTVSSGGGGSEVQLVESGGGLVQPGGSLKLSCAASGFTFNKYAMNWVRQAPGKGLEWVARIRSKYNNYATYYADSVKDRFTISRDDSKNTAYLQMNNLKTEDTAVYYCVRHGNFGNSYISYWAYWGQGTLVTVSSGGGGSGGGGSGGGGSQTVVTQEPSLTVSPGGTVTLTCGSSTGAVTSGNYPNWVQQKPGQAPRGLIGGTKFLAPGTPARFSGSLLGGKAALTLSGVQPEDEAEYYCVLWYSNRWVFGGGTKLTVL

SEQ ID NO: 432 - DNA, 1488 bp, Artificial Sequence
  Her2/neu VL-VH x I2C VH VL
gatatccagatgacccagtccccgagctccctgtccgcctctgtgggcgatagggtcaccatcacctgccgtgccagtcaggatgtgaatactgctgtagcctggtatcaacagaaaccaggaaaagctccgaaactactgatttactcggcatccttcctctactctggagtcccttctcgcttctctggatccagatctgggacggatttcactctgaccatcagcagtctgcagccggaagacttcgcaacttattactgtcagcaacattatactactcctcccacgttcggacagggtaccaaggtggagatcaaaggtggtggtggttctggcggcggcggctccggtggtggtggttctgaggttcagctggtggagtctggcggtggcctggtgcagccagggggctcactccgtttgtcctgtgcagcttctggcttcaacattaaagacacctatatacactgggtgcgtcaggccccgggtaagggcctggaatgggttgcaaggatttatcctacgaatggttatactagatatgccgatagcgtcaagggccgtttcactataagcgcagacacatccaaaaacacagcctacctgcagatgaacagcctgcgtgctgaggacactgccgtctattattgttctaggtggggaggggacggcttctatgctatggactattggggtcaaggaaccctggtcactgtctcctccggaggtggtggatccgaggtgcagctggtcgagtctggaggaggattggtgcagcctggagggtcattgaaactctcatgtgcagcctctggattcaccttcaataagtacgccatgaactgggtccgccaggctccaggaaagggtttggaatgggttgctcgcataagaagtaaatataataattatgcaacatattatgccgattcagtgaaagacaggttcaccatctccagagatgattcaaaaaacactgcctatctacaaatgaacaacttgaagactgaggacactgccgtgtactactgtgtgagacatgggaacttcggtaatagctacatatcctactgggcttactggggccaagggactctggtcaccgtctcctcaggtggtggtggttctggcggcggcggctccggtggtggtggttctcagactgttgtgactcaggaaccttcactcaccgtatcacctggtggaacagtcacactcacttgtggctcctcgactggggctgttacatctggcaactacccaaactgggtccaacaaaaaccaggtcaggcaccccgtggtctaataggtgggactaagttcctcgcccccggtactcctgccagattctcaggctccctgcttggaggcaaggctgccctcaccctctcaggggtacagccagaggatgaggcagaatattactgtgttctatggtacagcaaccgctgggtgttcggtggaggaaccaaactgactgtccta

SEQ ID NO: 433 - protein, 496 aa, Artificial Sequence
  Her2/neu VH-VL x F12Q VH VL
EVQLVESGGGLVQPGGSLRLSCAASGFNIKDTYIHWVRQAPGKGLEWVARIYPTNGYTRYADSVKGRFTISADTSKNTAYLQMNSLRAEDTAVYYCSRWGGDGFYAMDYWGQGTLVTVSSGGGGSGGGGSGGGGSDIQMTQSPSSLSASVGDRVTITCRASQDVNTAVAWYQQKPGKAPKLLIYSASFLYSGVPSRFSGSRSGTDFTLTISSLQPEDFATYYCQQHYTTPPTFGQGTKVEIKGGGGSEVQLVESGGGLVQPGGSLKLSCAASGFTFNSYAMNWVRQAPGKGLEWVARIRSKYNNYATYYADSVKGRFTISRDDSKNTAYLQMNNLKTEDTAVYYCVRHGNFGNSYVSWWAYWGQGTLVTVSSGGGGSGGGGSGGGGSQTVVTQEPSLTVSPGGTVTLTCGSSTGAVTSGNYPNWVQQKPGQAPRGLIGGTKFLAPGTPARFSGSLLGGKAALTLSGVQPEDEAEYYCVLWYSNRWVFGGGTKLTVL

SEQ ID NO: 434 - DNA, 1488 bp, Artificial Sequence
  Her2/neu VH-VL x F12Q  VH VL
gaggttcagctggtggagtctggcggtggcctggtgcagccagggggctcactccgtttgtcctgtgcagcttctggcttcaacattaaagacacctatatacactgggtgcgtcaggccccgggtaagggcctggaatgggttgcaaggatttatcctacgaatggttatactagatatgccgatagcgtcaagggccgtttcactataagcgcagacacatccaaaaacacagcctacctgcagatgaacagcctgcgtgctgaggacactgccgtctattattgttctaggtggggaggggacggcttctatgctatggactattggggtcaaggaaccctggtcactgtctcctccggtggtggtggttctggcggcggcggctccggtggtggtggttctgatatccagatgacccagtccccgagctccctgtccgcctctgtgggcgatagggtcaccatcacctgccgtgccagtcaggatgtgaatactgctgtagcctggtatcaacagaaaccaggaaaagctccgaaactactgatttactcggcatccttcctctactctggagtcccttctcgcttctctggatccagatctgggacggatttcactctgaccatcagcagtctgcagccggaagacttcgcaacttattactgtcagcaacattatactactcctcccacgttcggacagggtaccaaggtggagatcaaaggaggtggtggatccgaggtgcagctggtcgagtctggaggaggattggtgcagcctggagggtcattgaaactctcatgtgcagcctctggattcaccttcaatagctacgccatgaactgggtccgccaggctccaggaaagggtttggaatgggttgctcgcataagaagtaaatataataattatgcaacatattatgccgattcagtgaaaggcaggttcaccatctccagagatgattcaaaaaacactgcctatctacaaatgaacaacttgaaaactgaggacactgccgtgtactactgtgtgagacatgggaacttcggtaatagctacgtttcctggtgggcttactggggccaagggactctggtcaccgtctcctcaggtggtggtggttctggcggcggcggctccggtggtggtggttctcagactgttgtgactcaggaaccttcactcaccgtatcacctggtggaacagtcacactcacttgtggctcctcgactggggctgttacatctggcaactacccaaactgggtccaacaaaaaccaggtcaggcaccccgtggtctaataggtgggactaagttcctcgcccccggtactcctgccagattctcaggctccctgcttggaggcaaggctgccctcaccctctcaggggtacagccagaggatgaggcagaatattactgtgttctatggtacagcaaccgctgggtgttcggtggaggaaccaaactgactgtccta

SEQ ID NO: 435 - protein, 496 aa, Artificial Sequence
  Her2/neu VL-VH x F12Q  VH VL
DIQMTQSPSSLSASVGDRVTITCRASQDVNTAVAWYQQKPGKAPKLLIYSASFLYSGVPSRFSGSRSGTDFTLTISSLQPEDFATYYCQQHYTTPPTFGQGTKVEIKGGGGSGGGGSGGGGSEVQLVESGGGLVQPGGSLRLSCAASGFNIKDTYIHWVRQAPGKGLEWVARIYPTNGYTRYADSVKGRFTISADTSKNTAYLQMNSLRAEDTAVYYCSRWGGDGFYAMDYWGQGTLVTVSSGGGGSEVQLVESGGGLVQPGGSLKLSCAASGFTFNSYAMNWVRQAPGKGLEWVARIRSKYNNYATYYADSVKGRFTISRDDSKNTAYLQMNNLKTEDTAVYYCVRHGNFGNSYVSWWAYWGQGTLVTVSSGGGGSGGGGSGGGGSQTVVTQEPSLTVSPGGTVTLTCGSSTGAVTSGNYPNWVQQKPGQAPRGLIGGTKFLAPGTPARFSGSLLGGKAALTLSGVQPEDEAEYYCVLWYSNRWVFGGGTKLTVL

SEQ ID NO: 436 - DNA, 1488 bp, Artificial Sequence
  Her2/neu VL-VH x F12Q  VH VL
gatatccagatgacccagtccccgagctccctgtccgcctctgtgggcgatagggtcaccatcacctgccgtgccagtcaggatgtgaatactgctgtagcctggtatcaacagaaaccaggaaaagctccgaaactactgatttactcggcatccttcctctactctggagtcccttctcgcttctctggatccagatctgggacggatttcactctgaccatcagcagtctgcagccggaagacttcgcaacttattactgtcagcaacattatactactcctcccacgttcggacagggtaccaaggtggagatcaaaggtggtggtggttctggcggcggcggctccggtggtggtggttctgaggttcagctggtggagtctggcggtggcctggtgcagccagggggctcactccgtttgtcctgtgcagcttctggcttcaacattaaagacacctatatacactgggtgcgtcaggccccgggtaagggcctggaatgggttgcaaggatttatcctacgaatggttatactagatatgccgatagcgtcaagggccgtttcactataagcgcagacacatccaaaaacacagcctacctgcagatgaacagcctgcgtgctgaggacactgccgtctattattgttctaggtggggaggggacggcttctatgctatggactattggggtcaaggaaccctggtcactgtctcctccggaggtggtggatccgaggtgcagctggtcgagtctggaggaggattggtgcagcctggagggtcattgaaactctcatgtgcagcctctggattcaccttcaatagctacgccatgaactgggtccgccaggctccaggaaagggtttggaatgggttgctcgcataagaagtaaatataataattatgcaacatattatgccgattcagtgaaaggcaggttcaccatctccagagatgattcaaaaaacactgcctatctacaaatgaacaacttgaaaactgaggacactgccgtgtactactgtgtgagacatgggaacttcggtaatagctacgtttcctggtgggcttactggggccaagggactctggtcaccgtctcctcaggtggtggtggttctggcggcggcggctccggtggtggtggttctcagactgttgtgactcaggaaccttcactcaccgtatcacctggtggaacagtcacactcacttgtggctcctcgactggggctgttacatctggcaactacccaaactgggtccaacaaaaaccaggtcaggcaccccgtggtctaataggtgggactaagttcctcgcccccggtactcctgccagattctcaggctccctgcttggaggcaaggctgccctcaccctctcaggggtacagccagaggatgaggcagaatattactgtgttctatggtacagcaaccgctgggtgttcggtggaggaaccaaactgactgtccta

SEQ ID NO: 437 - protein, 496 aa, Artificial Sequence
  Her2/neu VH-VL x H2C VH VL
EVQLVESGGGLVQPGGSLRLSCAASGFNIKDTYIHWVRQAPGKGLEWVARIYPTNGYTRYADSVKGRFTISADTSKNTAYLQMNSLRAEDTAVYYCSRWGGDGFYAMDYWGQGTLVTVSSGGGGSGGGGSGGGGSDIQMTQSPSSLSASVGDRVTITCRASQDVNTAVAWYQQKPGKAPKLLIYSASFLYSGVPSRFSGSRSGTDFTLTISSLQPEDFATYYCQQHYTTPPTFGQGTKVEIKGGGGSEVQLVESGGGLVQPGGSLKLSCAASGFTFNKYAMNWVRQAPGKGLEWVARIRSKYNNYATYYADSVKDRFTISRDDSKNTAYLQMNNLKTEDTAVYYCVRHGNFGNSYISYWAYWGQGTLVTVSSGGGGSGGGGSGGGGSQTVVTQEPSLTVSPGGTVTLTCGSSTGAVTSGYYPNWVQQKPGQAPRGLIGGTKFLAPGTPARFSGSLLGGKAALTLSGVQPEDEAEYYCALWYSNRWVFGGGTKLTVL

SEQ ID NO: 438 - DNA, 1488 bp, Artificial Sequence
  Her2/neu VH-VL x H2C  VH VL
gaggttcagctggtggagtctggcggtggcctggtgcagccagggggctcactccgtttgtcctgtgcagcttctggcttcaacattaaagacacctatatacactgggtgcgtcaggccccgggtaagggcctggaatgggttgcaaggatttatcctacgaatggttatactagatatgccgatagcgtcaagggccgtttcactataagcgcagacacatccaaaaacacagcctacctgcagatgaacagcctgcgtgctgaggacactgccgtctattattgttctaggtggggaggggacggcttctatgctatggactattggggtcaaggaaccctggtcactgtctcctccggtggtggtggttctggcggcggcggctccggtggtggtggttctgatatccagatgacccagtccccgagctccctgtccgcctctgtgggcgatagggtcaccatcacctgccgtgccagtcaggatgtgaatactgctgtagcctggtatcaacagaaaccaggaaaagctccgaaactactgatttactcggcatccttcctctactctggagtcccttctcgcttctctggatccagatctgggacggatttcactctgaccatcagcagtctgcagccggaagacttcgcaacttattactgtcagcaacattatactactcctcccacgttcggacagggtaccaaggtggagatcaaaggaggtggtggatccgaggtgcagctggtcgagtctggaggaggattggtgcagcctggagggtcattgaaactctcatgtgcagcctctggattcaccttcaataagtacgccatgaactgggtccgccaggctccaggaaagggtttggaatgggttgctcgcataagaagtaaatataataattatgcaacatattatgccgattcagtgaaagacaggttcaccatctccagagatgattcaaaaaacactgcctatctacaaatgaacaacttgaaaactgaggacactgccgtgtactactgtgtgagacatgggaacttcggtaatagctacatatcctactgggcttactggggccaagggactctggtcaccgtctcctcaggtggtggtggttctggcggcggcggctccggtggtggtggttctcagactgttgtgactcaggaaccttcactcaccgtatcacctggtggaacagtcacactcacttgtggctcctcgactggggctgttacatctggctactacccaaactgggtccaacaaaaaccaggtcaggcaccccgtggtctaataggtgggactaagttcctcgcccccggtactcctgccagattctcaggctccctgcttggaggcaaggctgccctcaccctctcaggggtacagccagaggatgaggcagaatattactgtgctctatggtacagcaaccgctgggtgttcggtggaggaaccaaactgactgtccta

SEQ ID NO: 439 - protein, 496 aa, Artificial Sequence
  Her2/neu VL-VH x H2C  VH VL
DIQMTQSPSSLSASVGDRVTITCRASQDVNTAVAWYQQKPGKAPKLLIYSASFLYSGVPSRFSGSRSGTDFTLTISSLQPEDFATYYCQQHYTTPPTFGQGTKVEIKGGGGSGGGGSGGGGSEVQLVESGGGLVQPGGSLRLSCAASGFNIKDTYIHWVRQAPGKGLEWVARIYPTNGYTRYADSVKGRFTISADTSKNTAYLQMNSLRAEDTAVYYCSRWGGDGFYAMDYWGQGTLVTVSSGGGGSEVQLVESGGGLVQPGGSLKLSCAASGFTFNKYAMNWVRQAPGKGLEWVARIRSKYNNYATYYADSVKDRFTISRDDSKNTAYLQMNNLKTEDTAVYYCVRHGNFGNSYISYWAYWGQGTLVTVSSGGGGSGGGGSGGGGSQTVVTQEPSLTVSPGGTVTLTCGSSTGAVTSGYYPNWVQQKPGQAPRGLIGGTKFLAPGTPARFSGSLLGGKAALTLSGVQPEDEAEYYCALWYSNRWVFGGGTKLTVL

SEQ ID NO: 440 - DNA, 1488 bp, Artificial Sequence
  Her2/neu VL-VH x H2C  VH VL
gatatccagatgacccagtccccgagctccctgtccgcctctgtgggcgatagggtcaccatcacctgccgtgccagtcaggatgtgaatactgctgtagcctggtatcaacagaaaccaggaaaagctccgaaactactgatttactcggcatccttcctctactctggagtcccttctcgcttctctggatccagatctgggacggatttcactctgaccatcagcagtctgcagccggaagacttcgcaacttattactgtcagcaacattatactactcctcccacgttcggacagggtaccaaggtggagatcaaaggtggtggtggttctggcggcggcggctccggtggtggtggttctgaggttcagctggtggagtctggcggtggcctggtgcagccagggggctcactccgtttgtcctgtgcagcttctggcttcaacattaaagacacctatatacactgggtgcgtcaggccccgggtaagggcctggaatgggttgcaaggatttatcctacgaatggttatactagatatgccgatagcgtcaagggccgtttcactataagcgcagacacatccaaaaacacagcctacctgcagatgaacagcctgcgtgctgaggacactgccgtctattattgttctaggtggggaggggacggcttctatgctatggactattggggtcaaggaaccctggtcactgtctcctccggaggtggtggatccgaggtgcagctggtcgagtctggaggaggattggtgcagcctggagggtcattgaaactctcatgtgcagcctctggattcaccttcaataagtacgccatgaactgggtccgccaggctccaggaaagggtttggaatgggttgctcgcataagaagtaaatataataattatgcaacatattatgccgattcagtgaaagacaggttcaccatctccagagatgattcaaaaaacactgcctatctacaaatgaacaacttgaaaactgaggacactgccgtgtactactgtgtgagacatgggaacttcggtaatagctacatatcctactgggcttactggggccaagggactctggtcaccgtctcctcaggtggtggtggttctggcggcggcggctccggtggtggtggttctcagactgttgtgactcaggaaccttcactcaccgtatcacctggtggaacagtcacactcacttgtggctcctcgactggggctgttacatctggctactacccaaactgggtccaacaaaaaccaggtcaggcaccccgtggtctaataggtgggactaagttcctcgcccccggtactcctgccagattctcaggctccctgcttggaggcaaggctgccctcaccctctcaggggtacagccagaggatgaggcagaatattactgtgctctatggtacagcaaccgctgggtgttcggtggaggaaccaaactgactgtccta

SEQ ID NO: 441 - protein, 7 aa, Artificial Sequence
  HCDR1 of EGFR
SGDYYWT

SEQ ID NO: 442 - protein, 16 aa, Artificial Sequence
  HCDR2 of EGFR
HIYYSGNTNYNPSLKS

SEQ ID NO: 443 - protein, 9 aa, Artificial Sequence
  HCDR3 of EGFR
DRVTGAFDI

SEQ ID NO: 444 - protein, 11 aa, Artificial Sequence
  LCDR1 of EGFR
QASQDISNYLN

SEQ ID NO: 445 - protein, 7 aa, Artificial Sequence
  LCDR2 of EGFR
DASNLET

SEQ ID NO: 446 - protein, 9 aa, Artificial Sequence
  LCDR3 of EGFR
QHFDHLPLA

SEQ ID NO: 447 - protein, 496 aa, Artificial Sequence
  EGFR HL x H2C HL
QVQLQESGPGLVKPSETLSLTCTVSGGSVSSGDYYWTWIRQSPGKGLEWIGHIYYSGNTNYNPSLKSRLTISIDTSKTQFSLKLSSVTAADTAIYYCVRDRVTGAFDIWGQGTMVTVSSGGGGSGGGGSGGGGSDIQMTQSPSSLSASVGDRVTITCQASQDISNYLNWYQQKPGKAPKLLIYDASNLETGVPSRFSGSGSGTDFTFTISSLQPEDIATYFCQHFDHLPLAFGGGTKVEIKSGGGGSEVQLVESGGGLVQPGGSLKLSCAASGFTFNKYAMNWVRQAPGKGLEWVARIRSKYNNYATYYADSVKDRFTISRDDSKNTAYLQMNNLKTEDTAVYYCVRHGNFGNSYISYWAYWGQGTLVTVSSGGGGSGGGGSGGGGSQTVVTQEPSLTVSPGGTVTLTCGSSTGAVTSGYYPNWVQQKPGQAPRGLIGGTKFLAPGTPARFSGSLLGGKAALTLSGVQPEDEAEYYCALWYSNRWVFGGGTKLTVL

SEQ ID NO: 448 - DNA, 1488 bp, Artificial Sequence
  EGFR HL x H2C HL
caggtgcagctgcaggagtcgggcccaggactggtgaagccttcggagaccctgtccctcacctgcactgtctctggtggctccgtcagcagtggtgattactactggacctggatccggcagtccccagggaagggactggagtggattggacacatctattacagtgggaacaccaattataacccctccctcaagagccgactcaccatatcaattgacacgtccaagactcagttctccctgaagctgagttctgtgaccgctgcggacacggccatttattactgtgtgcgagatcgagtgactggtgcttttgatatctggggccaagggacaatggtcaccgtctcttccggtggtggtggttctggcggcggcggctccggtggtggtggttctgacatccagatgacccagtctccatcctccctgtctgcatctgtcggagacagagtcaccatcacttgccaggcgagtcaggacatcagcaactatttaaattggtatcagcagaaaccagggaaagcccctaaactcctgatctacgatgcatccaatttggaaacaggggtcccatcaaggttcagtggaagtggatctgggacagattttactttcaccatcagcagcctgcagcctgaagatattgcaacatatttctgtcaacactttgatcatctcccgctcgctttcggcggagggaccaaggtggagatcaaatccggaggtggtggatccgaggtgcagctggtcgagtctggaggaggattggtgcagcctggagggtcattgaaactctcatgtgcagcctctggattcaccttcaataagtacgccatgaactgggtccgccaggctccaggaaagggtttggaatgggttgctcgcataagaagtaaatataataattatgcaacatattatgccgattcagtgaaagacaggttcaccatctccagagatgattcaaaaaacactgcctatctacaaatgaacaacttgaaaactgaggacactgccgtgtactactgtgtgagacatgggaacttcggtaatagctacatatcctactgggcttactggggccaagggactctggtcaccgtctcctcaggtggtggtggttctggcggcggcggctccggtggtggtggttctcagactgttgtgactcaggaaccttcactcaccgtatcacctggtggaacagtcacactcacttgtggctcctcgactggggctgttacatctggctactacccaaactgggtccaacaaaaaccaggtcaggcaccccgtggtctaataggtgggactaagttcctcgcccccggtactcctgccagattctcaggctccctgcttggaggcaaggctgccctcaccctctcaggggtacagccagaggatgaggcagaatattactgtgctctatggtacagcaaccgctgggtgttcggtggaggaaccaaactgactgtccta

SEQ ID NO: 449 - protein, 496 aa, Artificial Sequence
  EGFR HL x F12Q LH
QVQLQESGPGLVKPSETLSLTCTVSGGSVSSGDYYWTWIRQSPGKGLEWIGHIYYSGNTNYNPSLKSRLTISIDTSKTQFSLKLSSVTAADTAIYYCVRDRVTGAFDIWGQGTMVTVSSGGGGSGGGGSGGGGSDIQMTQSPSSLSASVGDRVTITCQASQDISNYLNWYQQKPGKAPKLLIYDASNLETGVPSRFSGSGSGTDFTFTISSLQPEDIATYFCQHFDHLPLAFGGGTKVEIKSGGGGSEVQLVESGGGLVQPGGSLKLSCAASGFTFNSYAMNWVRQAPGKGLEWVARIRSKYNNYATYYADSVKGRFTISRDDSKNTAYLQMNNLKTEDTAVYYCVRHGNFGNSYVSWWAYWGQGTLVTVSSGGGGSGGGGSGGGGSQTVVTQEPSLTVSPGGTVTLTCGSSTGAVTSGNYPNWVQQKPGQAPRGLIGGTKFLAPGTPARFSGSLLGGKAALTLSGVQPEDEAEYYCVLWYSNRWVFGGGTKLTVL

SEQ ID NO: 450 - DNA, 1488 bp, Artificial Sequence
  EGFR HL x F12Q LH
caggtgcagctgcaggagtcgggcccaggactggtgaagccttcggagaccctgtccctcacctgcactgtctctggtggctccgtcagcagtggtgattactactggacctggatccggcagtccccagggaagggactggagtggattggacacatctattacagtgggaacaccaattataacccctccctcaagagccgactcaccatatcaattgacacgtccaagactcagttctccctgaagctgagttctgtgaccgctgcggacacggccatttattactgtgtgcgagatcgagtgactggtgcttttgatatctggggccaagggacaatggtcaccgtctcttccggtggtggtggttctggcggcggcggctccggtggtggtggttctgacatccagatgacccagtctccatcctccctgtctgcatctgtcggagacagagtcaccatcacttgccaggcgagtcaggacatcagcaactatttaaattggtatcagcagaaaccagggaaagcccctaaactcctgatctacgatgcatccaatttggaaacaggggtcccatcaaggttcagtggaagtggatctgggacagattttactttcaccatcagcagcctgcagcctgaagatattgcaacatatttctgtcaacactttgatcatctcccgctcgctttcggcggagggaccaaggtggagatcaaatccggaggtggtggatccgaggtgcagctggtcgagtctggaggaggattggtgcagcctggagggtcattgaaactctcatgtgcagcctctggattcaccttcaatagctacgccatgaactgggtccgccaggctccaggaaagggtttggaatgggttgctcgcataagaagtaaatataataattatgcaacatattatgccgattcagtgaaaggcaggttcaccatctccagagatgattcaaaaaacactgcctatctacaaatgaacaacttgaaaactgaggacactgccgtgtactactgtgtgagacatgggaacttcggtaatagctacgtttcctggtgggcttactggggccaagggactctggtcaccgtctcctcaggtggtggtggttctggcggcggcggctccggtggtggtggttctcagactgttgtgactcaggaaccttcactcaccgtatcacctggtggaacagtcacactcacttgtggctcctcgactggggctgttacatctggcaactacccaaactgggtccaacaaaaaccaggtcaggcaccccgtggtctaataggtgggactaagttcctcgcccccggtactcctgccagattctcaggctccctgcttggaggcaaggctgccctcaccctctcaggggtacagccagaggatgaggcagaatattactgtgttctatggtacagcaaccgctgggtgttcggtggaggaaccaaactgactgtccta

SEQ ID NO: 451 - protein, 496 aa, Artificial Sequence
  EGFR HL x I2C HL
QVQLQESGPGLVKPSETLSLTCTVSGGSVSSGDYYWTWIRQSPGKGLEWIGHIYYSGNTNYNPSLKSRLTISIDTSKTQFSLKLSSVTAADTAIYYCVRDRVTGAFDIWGQGTMVTVSSGGGGSGGGGSGGGGSDIQMTQSPSSLSASVGDRVTITCQASQDISNYLNWYQQKPGKAPKLLIYDASNLETGVPSRFSGSGSGTDFTFTISSLQPEDIATYFCQHFDHLPLAFGGGTKVEIKSGGGGSEVQLVESGGGLVQPGGSLKLSCAASGFTFNKYAMNWVRQAPGKGLEWVARIRSKYNNYATYYADSVKDRFTISRDDSKNTAYLQMNNLKTEDTAVYYCVRHGNFGNSYISYWAYWGQGTLVTVSSGGGGSGGGGSGGGGSQTVVTQEPSLTVSPGGTVTLTCGSSTGAVTSGNYPNWVQQKPGQAPRGLIGGTKFLAPGTPARFSGSLLGGKAALTLSGVQPEDEAEYYCVLWYSNRWVFGGGTKLTVL

SEQ ID NO: 452 - DNA, 1488 bp, Artificial Sequence
  EGFR HL x I2C HL
caggtgcagctgcaggagtcgggcccaggactggtgaagccttcggagaccctgtccctcacctgcactgtctctggtggctccgtcagcagtggtgattactactggacctggatccggcagtccccagggaagggactggagtggattggacacatctattacagtgggaacaccaattataacccctccctcaagagccgactcaccatatcaattgacacgtccaagactcagttctccctgaagctgagttctgtgaccgctgcggacacggccatttattactgtgtgcgagatcgagtgactggtgcttttgatatctggggccaagggacaatggtcaccgtctcttccggtggtggtggttctggcggcggcggctccggtggtggtggttctgacatccagatgacccagtctccatcctccctgtctgcatctgtcggagacagagtcaccatcacttgccaggcgagtcaggacatcagcaactatttaaattggtatcagcagaaaccagggaaagcccctaaactcctgatctacgatgcatccaatttggaaacaggggtcccatcaaggttcagtggaagtggatctgggacagattttactttcaccatcagcagcctgcagcctgaagatattgcaacatatttctgtcaacactttgatcatctcccgctcgctttcggcggagggaccaaggtggagatcaaatccggaggtggtggatccgaggtgcagctggtcgagtctggaggaggattggtgcagcctggagggtcattgaaactctcatgtgcagcctctggattcaccttcaataagtacgccatgaactgggtccgccaggctccaggaaagggtttggaatgggttgctcgcataagaagtaaatataataattatgcaacatattatgccgattcagtgaaagacaggttcaccatctccagagatgattcaaaaaacactgcctatctacaaatgaacaacttgaaaactgaggacactgccgtgtactactgtgtgagacatgggaacttcggtaatagctacatatcctactgggcttactggggccaagggactctggtcaccgtctcctcaggtggtggtggttctggcggcggcggctccggtggtggtggttctcagactgttgtgactcaggaaccttcactcaccgtatcacctggtggaacagtcacactcacttgtggctcctcgactggggctgttacatctggcaactacccaaactgggtccaacaaaaaccaggtcaggcaccccgtggtctaataggtgggactaagttcctcgcccccggtactcctgccagattctcaggctccctgcttggaggcaaggctgccctcaccctctcaggggtacagccagaggatgaggcagaatattactgtgttctatggtacagcaaccgctgggtgttcggtggaggaaccaaactgactgtccta

SEQ ID NO: 453 - protein, 5 aa, Artificial Sequence
  HCDR1 of EGFR
NYGVH

SEQ ID NO: 454 - protein, 16 aa, Artificial Sequence
  HCDR2 of EGFR
VIWSGGNTDYNTPFTS

SEQ ID NO: 455 - protein, 11 aa, Artificial Sequence
  HCDR3 of EGFR
ALTYYDYEFAY

SEQ ID NO: 456 - protein, 11 aa, Artificial Sequence
  LCDR1 of EGFR
RASQSIGTNIH

SEQ ID NO: 457 - protein, 7 aa, Artificial Sequence
  LCDR2 of EGFR
YASESIS

SEQ ID NO: 458 - protein, 9 aa, Artificial Sequence
  LCDR3 of EGFR
QQNNNWPTT

SEQ ID NO: 459 - DNA, 3768 bp, Homo sapiens
atggagctggcggccttgtgccgctgggggctcctcctcgccctcttgccccccggagccgcgagcacccaagtgtgcaccggcacagacatgaagctgcggctccctgccagtcccgagacccacctggacatgctccgccacctctaccagggctgccaggtggtgcagggaaacctggaactcacctacctgcccaccaatgccagcctgtccttcctgcaggatatccaggaggtgcagggctacgtgctcatcgctcacaaccaagtgaggcaggtcccactgcagaggctgcggattgtgcgaggcacccagctctttgaggacaactatgccctggccgtgctagacaatggagacccgctgaacaataccacccctgtcacaggggcctccccaggaggcctgcgggagctgcagcttcgaagcctcacagagatcttgaaaggaggggtcttgatccagcggaacccccagctctgctaccaggacacgattttgtggaaggacatcttccacaagaacaaccagctggctctcacactgatagacaccaaccgctctcgggcctgccacccctgttctccgatgtgtaagggctcccgctgctggggagagagttctgaggattgtcagagcctgacgcgcactgtctgtgccggtggctgtgcccgctgcaaggggccactgcccactgactgctgccatgagcagtgtgctgccggctgcacgggccccaagcactctgactgcctggcctgcctccacttcaaccacagtggcatctgtgagctgcactgcccagccctggtcacctacaacacagacacgtttgagtccatgcccaatcccgagggccggtatacattcggcgccagctgtgtgactgcctgtccctacaactacctttctacggacgtgggatcctgcaccctcgtctgccccctgcacaaccaagaggtgacagcagaggatggaacacagcggtgtgagaagtgcagcaagccctgtgcccgagtgtgctatggtctgggcatggagcacttgcgagaggtgagggcagttaccagtgccaatatccaggagtttgctggctgcaagaagatctttgggagcctggcatttctgccggaaagctttgatggggacccagcctccaacactgccccgctccagccagagcagctccaagtgtttgagactctggaagagatcacaggttacctatacatctcagcatggccggacagcctgcctgacctcagcgtcttccagaacctgcaagtaatccggggacgaattctgcacaatggcgcctactcgctgaccctgcaagggctgggcatcagctggctggggctgcgctcactgagggaactgggcagtggactggccctcatccaccataacacccacctctgcttcgtgcacacggtgccctgggaccagctctttcggaacccgcaccaagctctgctccacactgccaaccggccagaggacgagtgtgtgggcgagggcctggcctgccaccagctgtgcgcccgagggcactgctggggtccagggcccacccagtgtgtcaactgcagccagttccttcggggccaggagtgcgtggaggaatgccgagtactgcaggggctccccagggagtatgtgaatgccaggcactgtttgccgtgccaccctgagtgtcagccccagaatggctcagtgacctgttttggaccggaggctgaccagtgtgtggcctgtgcccactataaggaccctcccttctgcgtggcccgctgccccagcggtgtgaaacctgacctctcctacatgcccatctggaagtttccagatgaggagggcgcatgccagccttgccccatcaactgcacccactcctgtgtggacctggatgacaagggctgccccgccgagcagagagccagccctctgacgtccatcatctctgcggtggttggcattctgctggtcgtggtcttgggggtggtctttgggatcctcatcaagcgacggcagcagaagatccggaagtacacgatgcggagactgctgcaggaaacggagctggtggagccgctgacacctagcggagcgatgcccaaccaggcgcagatgcggatcctgaaagagacggagctgaggaaggtgaaggtgcttggatctggcgcttttggcacagtctacaagggcatctggatccctgatggggagaatgtgaaaattccagtggccatcaaagtgttgagggaaaacacatcccccaaagccaacaaagaaatcttagacgaagcatacgtgatggctggtgtgggctccccatatgtctcccgccttctgggcatctgcctgacatccacggtgcagctggtgacacagcttatgccctatggctgcctcttagaccatgtccgggaaaaccgcggacgcctgggctcccaggacctgctgaactggtgtatgcagattgccaaggggatgagctacctggaggatgtgcggctcgtacacagggacttggccgctcggaacgtgctggtcaagagtcccaaccatgtcaaaattacagacttcgggctggctcggctgctggacattgacgagacagagtaccatgcagatgggggcaaggtgcccatcaagtggatggcgctggagtccattctccgccggcggttcacccaccagagtgatgtgtggagttatggtgtgactgtgtgggagctgatgacttttggggccaaaccttacgatgggatcccagcccgggagatccctgacctgctggaaaagggggagcggctgccccagccccccatctgcaccattgatgtctacatgatcatggtcaaatgttggatgattgactctgaatgtcggccaagattccgggagttggtgtctgaattctcccgcatggccagggacccccagcgctttgtggtcatccagaatgaggacttgggcccagccagtcccttggacagcaccttctaccgctcactgctggaggacgatgacatgggggacctggtggatgctgaggagtatctggtaccccagcagggcttcttctgtccagaccctgccccgggcgctgggggcatggtccaccacaggcaccgcagctcatctaccaggagtggcggtggggacctgacactagggctggagccctctgaagaggaggcccccaggtctccactggcaccctccgaaggggctggctccgatgtatttgatggtgacctgggaatgggggcagccaaggggctgcaaagcctccccacacatgaccccagccctctacagcggtacagtgaggaccccacagtacccctgccctctgagactgatggctacgttgcccccctgacctgcagcccccagcctgaatatgtgaaccagccagatgttcggccccagcccccttcgccccgagagggccctctgcctgctgcccgacctgctggtgccactctggaaaggcccaagactctctccccagggaagaatggggtcgtcaaagacgtttttgcctttgggggtgccgtggagaaccccgagtacttgacaccccagggaggagctgcccctcagccccaccctcctcctgccttcagcccagccttcgacaacctctattactgggaccaggacccaccagagcggggggctccacccagcaccttcaaagggacacctacggcagagaacccagagtacctgggtctggacgtgccagtgtga

SEQ ID NO: 460 - protein, 1255 aa, Homo sapiens [sequence omitted]

SEQ ID NO: 461 - DNA, 3768 bp, Artificial Sequence
  chimeric human/macaque HER2 protein
atggagctggcggccttgtgccgctgggggctcctcctcgccctcttgccccccggagccgcgagcacccaagtgtgcaccggcacagacatgaagctgcggctccctgccagtcccgagacccacctggacatgctccgccacctctaccagggctgccaggtggtgcagggaaacctggaactcacctacctgcccaccaatgccagcctgtccttcctgcaggatatccaggaggtgcagggctacgtgctcatcgctcacaaccaagtgaggcaggtcccactgcagaggctgcggattgtgcgaggcacccagctctttgaggacaactatgccctggccgtgctagacaatggagacccgctgaacaataccacccctgtcacaggggcctccccaggaggcctgcgggagctgcagcttcgaagcctcacagagatcttgaaaggaggggtcttgatccagcggaacccccagctctgctaccaggacacgattttgtggaaggacatcttccacaagaacaaccagctggctctcacactgatagacaccaaccgctctcgggcctgccacccctgttctccagtgtgtaagggctcccgctgctggggagagagttctgaggattgtcagagcctgacgcgcactgtctgtgccggtggctgtgcccgctgcaaggggccactgcccactgactgctgccatgagcagtgtgctgccggctgcacgggccccaagcactctgactgcctggcctgcctccacttcaaccacagtggcatctgtgagctgcactgcccagccctggtcacctacaacacagacacgtttgagtccatgcccaatcccgagggccggtatacattcggcgccagctgtgtgactgcctgtccctacaactacctttctacggacgtgggatcctgcaccctcgtctgccccctgcacaaccaagaggtgacagcagaggatggaacacagcggtgtgagaagtgcagcaagccctgtgcccgagtgtgctatggtctgggcatggagcacttgcgagaggtgagggcagttaccagtgccaatatccaggagtttgctggctgcaagaagatctttgggagcctggcatttctgccggaaagctttgatggggacccagcctccaacactgccccgcttcagccggagcagctccgagtgtttgagactctggaagagatcacaggttacctatacatctcagcatggccagacagcctgcctgaccttagcgtcctccagaacctgcaagtaatccggggacgaattctgcacaatggcgcctactcgctgaccctgcaagggctgggcatcagctggctggggctgcgctcactgagggaactgggcagtggactggccctcatccaccataacacccgcctctgctttgtgcacacggtgccctgggaccagctctttcggaacccgcaccaagctctgctccacactgccaaccggccagaggacgagtgtgtgggcgagggcctggcctgccaccagctgtgcgcccgagggcactgctggggtccagggcccacccagtgtgtcaactgcagccagttccttcggggccaggagtgcgtggaggaatgccgagtactgcaggggctccccagggagtatgtgaatgccaggcactgtttgccgtgccaccctgagtgtcagccccagaatggctcagtgacctgttttggaccggaggctgaccagtgtgtggcctgtgcccactataaggaccctcccttctgcgtggcccgctgccccagcggtgtgaaacctgacctctcctacatgcccatctggaagtttccagatgaggagggcacgtgccagtcttgccccatcaactgcacccactcctgtgtggacctggatgacaagggctgccccgccgagcagagagccagccctctgactagtatcatctctgcggtggttggcattctgctggtcgtggtcttgggggtggtctttgggatcctcatcaagcgacggcagcagaagatccggaagtacacgatgcggagactgctgcaggaaacggagctggtggagccgctgacacctagcggagcgatgcccaaccaggcgcagatgcggatcctgaaagagacggagctgaggaaggtgaaggtgcttggatctggcgcttttggcacagtctacaagggcatctggatccctgatggggagaatgtgaaaattccagtggccatcaaagtgttgagggaaaacacatcccccaaagccaacaaagaaatcttagacgaagcatacgtgatggctggtgtgggctccccatatgtctcccgccttctgggcatctgcctgacatccacggtgcagctggtgacacagcttatgccctatggctgcctcttagaccatgtccgggaaaaccgcggacgcctgggctcccaggacctgctgaactggtgtatgcagattgccaaggggatgagctacctggaggatgtgcggctcgtacacagggacttggccgctcggaacgtgctggtcaagagtcccaaccatgtcaaaattacagacttcgggctggctcggctgctggacattgacgagacagagtaccatgcagatgggggcaaggtgcccatcaagtggatggcgctggagtccattctccgccggcggttcacccaccagagtgatgtgtggagttatggtgtgactgtgtgggagctgatgacttttggggccaaaccttacgatgggatcccagcccgggagatccctgacctgctggaaaagggggagcggctgccccagccccccatctgcaccattgatgtctacatgatcatggtcaaatgttggatgattgactctgaatgtcggccaagattccgggagttggtgtctgaattctcccgcatggccagggacccccagcgctttgtggtcatccagaatgaggacttgggcccagccagtcccttggacagcaccttctaccgctcactgctggaggacgatgacatgggggacctggtggatgctgaggagtatctggtaccccagcagggcttcttctgtccagaccctgccccgggcgctgggggcatggtccaccacaggcaccgcagctcatctaccaggagtggcggtggggacctgacactagggctggagccctctgaagaggaggcccccaggtctccactggcaccctccgaaggggctggctccgatgtatttgatggtgacctgggaatgggggcagccaaggggctgcaaagcctccccacacatgaccccagccctctacagcggtacagtgaggaccccacagtacccctgccctctgagactgatggctacgttgcccccctgacctgcagcccccagcctgaatatgtgaaccagccagatgttcggccccagcccccttcgccccgagagggccctctgcctgctgcccgacctgctggtgccactctggaaaggcccaagactctctccccagggaagaatggggtcgtcaaagacgtttttgcctttgggggtgccgtggagaaccccgagtacttgacaccccagggaggagctgcccctcagccccaccctcctcctgccttcagcccagccttcgacaacctctattactgggaccaggacccaccagagcggggggctccacccagcaccttcaaagggacacctacggcagagaacccagagtacctgggtctggacgtgccagtgtga

SEQ ID NO: 462 - protein, 1255 aa, Artificial Sequence
  chimeric human/macaque HER2 protein
MELAALCRWGLLLALLPPGAASTQVCTGTDMKLRLPASPETHLDMLRHLYQGCQVVQGNLELTYLPTNASLSFLQDIQEVQGYVLIAHNQVRQVPLQRLRIVRGTQLFEDNYALAVLDNGDPLNNTTPVTGASPGGLRELQLRSLTEILKGGVLIQRNPQLCYQDTILWKDIFHKNNQLALTLIDTNRSRACHPCSPVCKGSRCWGESSEDCQSLTRTVCAGGCARCKGPLPTDCCHEQCAAGCTGPKHSDCLACLHFNHSGICELHCPALVTYNTDTFESMPNPEGRYTFGASCVTACPYNYLSTDVGSCTLVCPLHNQEVTAEDGTQRCEKCSKPCARVCYGLGMEHLREVRAVTSANIQEFAGCKKIFGSLAFLPESFDGDPASNTAPLQPEQLRVFETLEEITGYLYISAWPDSLPDLSVLQNLQVIRGRILHNGAYSLTLQGLGISWLGLRSLRELGSGLALIHHNTRLCFVHTVPWDQLFRNPHQALLHTANRPEDECVGEGLACHQLCARGHCWGPGPTQCVNCSQFLRGQECVEECRVLQGLPREYVNARHCLPCHPECQPQNGSVTCFGPEADQCVACAHYKDPPFCVARCPSGVKPDLSYMPIWKFPDEEGTCQSCPINCTHSCVDLDDKGCPAEQRASPLTSIISAVVGILLVVVLGVVFGILIKRRQQKIRKYTMRRLLQETELVEPLTPSGAMPNQAQMRILKETELRKVKVLGSGAFGTVYKGIWIPDGENVKIPVAIKVLRENTSPKANKEILDEAYVMAGVGSPYVSRLLGICLTSTVQLVTQLMPYGCLLDHVRENRGRLGSQDLLNWCMQIAKGMSYLEDVRLVHRDLAARNVLVKSPNHVKITDFGLARLLDIDETEYHADGGKVPIKWMALESILRRRFTHQSDVWSYGVTVWELMTFGAKPYDGIPAREIPDLLEKGERLPQPPICTIDVYMIMVKCWMIDSECRPRFRELVSEFSRMARDPQRFVVIQNEDLGPASPLDSTFYRSLLEDDDMGDLVDAEEYLVPQQGFFCPDPAPGAGGMVHHRHRSSSTRSGGGDLTLGLEPSEEEAPRSPLAPSEGAGSDVFDGDLGMGAAKGLQSLPTHDPSPLQRYSEDPTVPLPSETDGYVAPLTCSPQPEYVNQPDVRPQPPSPREGPLPAARPAGATLERPKTLSPGKNGVVKDVFAFGGAVENPEYLTPQGGAAPQPHPPPAFSPAFDNLYYWDQDPPERGAPPSTFKGTPTAENPEYLGLDVPV

SEQ ID NO: 463 - protein, 5 aa, Artificial Sequence
  HCDR1 of Her2/neu
DTYIH

SEQ ID NO: 464 - protein, 17 aa, Artificial Sequence
  HCDR2 of Her2/neu
RIYPTNGYTRYADSVKG

SEQ ID NO: 465 - protein, 11 aa, Artificial Sequence
  HCDR3 of Her2/neu
WGGDGFYAMDY

SEQ ID NO: 466 - protein, 11 aa, Artificial Sequence
  LCDR1 of Her2/neu
RASQDVNTAVA

SEQ ID NO: 467 - protein, 7 aa, Artificial Sequence
  LCDR2 of Her2/neu
SASFLYS

SEQ ID NO: 468 - protein, 9 aa, Artificial Sequence
  LCDR3 of Her2/neu
QQHYTTPPT

SEQ ID NO: 469 - protein, 497 aa, Artificial Sequence
  Her2/neu HL x H2C HL
EVQLVESGGGLVQPGGSLRLSCAASGFNIKDTYIHWVRQAPGKGLEWVARIYPTNGYTRYADSVKGRFTISADTSKNTAYLQMNSLRAEDTAVYYCSRWGGDGFYAMDYWGQGTLVTVSSGGGGSGGGGSGGGGSDIQMTQSPSSLSASVGDRVTITCRASQDVNTAVAWYQQKPGKAPKLLIYSASFLYSGVPSRFSGSRSGTDFTLTISSLQPEDFATYYCQQHYTTPPTFGQGTKVEIKSGGGGSEVQLVESGGGLVQPGGSLKLSCAASGFTFNKYAMNWVRQAPGKGLEWVARIRSKYNNYATYYADSVKDRFTISRDDSKNTAYLQMNNLKTEDTAVYYCVRHGNFGNSYISYWAYWGQGTLVTVSSGGGGSGGGGSGGGGSQTVVTQEPSLTVSPGGTVTLTCGSSTGAVTSGYYPNWVQQKPGQAPRGLIGGTKFLAPGTPARFSGSLLGGKAALTLSGVQPEDEAEYYCALWYSNRWVFGGGTKLTVL

SEQ ID NO: 470 - DNA, 1491 bp, Artificial Sequence
  Her2/neu HL x H2C HL
gaggttcagctggtggagtctggcggtggcctggtgcagccagggggctcactccgtttgtcctgtgcagcttctggcttcaacattaaagacacctatatacactgggtgcgtcaggccccgggtaagggcctggaatgggttgcaaggatttatcctacgaatggttatactagatatgccgatagcgtcaagggccgtttcactataagcgcagacacatccaaaaacacagcctacctgcagatgaacagcctgcgtgctgaggacactgccgtctattattgttctaggtggggaggggacggcttctatgctatggactattggggtcaaggaaccctggtcactgtctcctccggtggtggtggttctggcggcggcggctccggtggtggtggttctgacatccagatgacccagtcccctagctccctgtccgcctctgtgggcgatagggtcaccatcacctgccgtgccagtcaggatgtgaatactgctgtagcctggtatcaacagaaaccaggaaaagctccgaaactactgatttactcggcatccttcctctactctggagtcccttctcgcttctctggatccagatctgggacggatttcactctgaccatcagcagtctgcagccggaagacttcgcaacttattactgtcagcaacattatactactcctcccacgttcggacagggtaccaaggtggagatcaaatccggaggtggtggatccgaggtgcagctggtcgagtctggaggaggattggtgcagcctggagggtcattgaaactctcatgtgcagcctctggattcaccttcaataagtacgccatgaactgggtccgccaggctccaggaaagggtttggaatgggttgctcgcataagaagtaaatataataattatgcaacatattatgccgattcagtgaaagacaggttcaccatctccagagatgattcaaaaaacactgcctatctacaaatgaacaacttgaaaactgaggacactgccgtgtactactgtgtgagacatgggaacttcggtaatagctacatatcctactgggcttactggggccaagggactctggtcaccgtctcctcaggtggtggtggttctggcggcggcggctccggtggtggtggttctcagactgttgtgactcaggaaccttcactcaccgtatcacctggtggaacagtcacactcacttgtggctcctcgactggggctgttacatctggctactacccaaactgggtccaacaaaaaccaggtcaggcaccccgtggtctaataggtgggactaagttcctcgcccccggtactcctgccagattctcaggctccctgcttggaggcaaggctgccctcaccctctcaggggtacagccagaggatgaggcagaatattactgtgctctatggtacagcaaccgctgggtgttcggtggaggaaccaaactgactgtccta

SEQ ID NO: 471 - protein, 497 aa, Artificial Sequence
  Her2/neu HL x F12Q HL
EVQLVESGGGLVQPGGSLRLSCAASGFNIKDTYIHWVRQAPGKGLEWVARIYPTNGYTRYADSVKGRFTISADTSKNTAYLQMNSLRAEDTAVYYCSRWGGDGFYAMDYWGQGTLVTVSSGGGGSGGGGSGGGGSDIQMTQSPSSLSASVGDRVTITCRASQDVNTAVAWYQQKPGKAPKLLIYSASFLYSGVPSRFSGSRSGTDFTLTISSLQPEDFATYYCQQHYTTPPTFGQGTKVEIKSGGGGSEVQLVESGGGLVQPGGSLKLSCAASGFTFNSYAMNWVRQAPGKGLEWVARIRSKYNNYATYYADSVKGRFTISRDDSKNTAYLQMNNLKTEDTAVYYCVRHGNFGNSYVSWWAYWGQGTLVTVSSGGGGSGGGGSGGGGSQTVVTQEPSLTVSPGGTVTLTCGSSTGAVTSGNYPNWVQQKPGQAPRGLIGGTKFLAPGTPARFSGSLLGGKAALTLSGVQPEDEAEYYCVLWYSNRWVFGGGTKLTVL

SEQ ID NO: 472 - DNA, 1491 bp, Artificial Sequence
  Her2/neu HL x F12Q HL
gaggttcagctggtggagtctggcggtggcctggtgcagccagggggctcactccgtttgtcctgtgcagcttctggcttcaacattaaagacacctatatacactgggtgcgtcaggccccgggtaagggcctggaatgggttgcaaggatttatcctacgaatggttatactagatatgccgatagcgtcaagggccgtttcactataagcgcagacacatccaaaaacacagcctacctgcagatgaacagcctgcgtgctgaggacactgccgtctattattgttctaggtggggaggggacggcttctatgctatggactattggggtcaaggaaccctggtcactgtctcctccggtggtggtggttctggcggcggcggctccggtggtggtggttctgacatccagatgacccagtcccctagctccctgtccgcctctgtgggcgatagggtcaccatcacctgccgtgccagtcaggatgtgaatactgctgtagcctggtatcaacagaaaccaggaaaagctccgaaactactgatttactcggcatccttcctctactctggagtcccttctcgcttctctggatccagatctgggacggatttcactctgaccatcagcagtctgcagccggaagacttcgcaacttattactgtcagcaacattatactactcctcccacgttcggacagggtaccaaggtggagatcaaatccggaggtggtggatccgaggtgcagctggtcgagtctggaggaggattggtgcagcctggagggtcattgaaactctcatgtgcagcctctggattcaccttcaatagctacgccatgaactgggtccgccaggctccaggaaagggtttggaatgggttgctcgcataagaagtaaatataataattatgcaacatattatgccgattcagtgaaaggcaggttcaccatctccagagatgattcaaaaaacactgcctatctacaaatgaacaacttgaaaactgaggacactgccgtgtactactgtgtgagacatgggaacttcggtaatagctacgtttcctggtgggcttactggggccaagggactctggtcaccgtctcctcaggtggtggtggttctggcggcggcggctccggtggtggtggttctcagactgttgtgactcaggaaccttcactcaccgtatcacctggtggaacagtcacactcacttgtggctcctcgactggggctgttacatctggcaactacccaaactgggtccaacaaaaaccaggtcaggcaccccgtggtctaataggtgggactaagttcctcgcccccggtactcctgccagattctcaggctccctgcttggaggcaaggctgccctcaccctctcaggggtacagccagaggatgaggcagaatattactgtgttctatggtacagcaaccgctgggtgttcggtggaggaaccaaactgactgtccta

SEQ ID NO: 473 - protein, 497 aa, Artificial Sequence
  Her2/neu HL x I2C HL
EVQLVESGGGLVQPGGSLRLSCAASGFNIKDTYIHWVRQAPGKGLEWVARIYPTNGYTRYADSVKGRFTISADTSKNTAYLQMNSLRAEDTAVYYCSRWGGDGFYAMDYWGQGTLVTVSSGGGGSGGGGSGGGGSDIQMTQSPSSLSASVGDRVTITCRASQDVNTAVAWYQQKPGKAPKLLIYSASFLYSGVPSRFSGSRSGTDFTLTISSLQPEDFATYYCQQHYTTPPTFGQGTKVEIKSGGGGSEVQLVESGGGLVQPGGSLKLSCAASGFTFNKYAMNWVRQAPGKGLEWVARIRSKYNNYATYYADSVKDRFTISRDDSKNTAYLQMNNLKTEDTAVYYCVRHGNFGNSYISYWAYWGQGTLVTVSSGGGGSGGGGSGGGGSQTVVTQEPSLTVSPGGTVTLTCGSSTGAVTSGNYPNWVQQKPGQAPRGLIGGTKFLAPGTPARFSGSLLGGKAALTLSGVQPEDEAEYYCVLWYSNRWVFGGGTKLTVL

SEQ ID NO: 474 - DNA, 1491 bp, Artificial Sequence
  Her2/neu HL x I2C HL
gaggttcagctggtggagtctggcggtggcctggtgcagccagggggctcactccgtttgtcctgtgcagcttctggcttcaacattaaagacacctatatacactgggtgcgtcaggccccgggtaagggcctggaatgggttgcaaggatttatcctacgaatggttatactagatatgccgatagcgtcaagggccgtttcactataagcgcagacacatccaaaaacacagcctacctgcagatgaacagcctgcgtgctgaggacactgccgtctattattgttctaggtggggaggggacggcttctatgctatggactattggggtcaaggaaccctggtcactgtctcctccggtggtggtggttctggcggcggcggctccggtggtggtggttctgacatccagatgacccagtcccctagctccctgtccgcctctgtgggcgatagggtcaccatcacctgccgtgccagtcaggatgtgaatactgctgtagcctggtatcaacagaaaccaggaaaagctccgaaactactgatttactcggcatccttcctctactctggagtcccttctcgcttctctggatccagatctgggacggatttcactctgaccatcagcagtctgcagccggaagacttcgcaacttattactgtcagcaacattatactactcctcccacgttcggacagggtaccaaggtggagatcaaatccggaggtggtggatccgaggtgcagctggtcgagtctggaggaggattggtgcagcctggagggtcattgaaactctcatgtgcagcctctggattcaccttcaataagtacgccatgaactgggtccgccaggctccaggaaagggtttggaatgggttgctcgcataagaagtaaatataataattatgcaacatattatgccgattcagtgaaagacaggttcaccatctccagagatgattcaaaaaacactgcctatctacaaatgaacaacttgaaaactgaggacactgccgtgtactactgtgtgagacatgggaacttcggtaatagctacatatcctactgggcttactggggccaagggactctggtcaccgtctcctcaggtggtggtggttctggcggcggcggctccggtggtggtggttctcagactgttgtgactcaggaaccttcactcaccgtatcacctggtggaacagtcacactcacttgtggctcctcgactggggctgttacatctggcaactacccaaactgggtccaacaaaaaccaggtcaggcaccccgtggtctaataggtgggactaagttcctcgcccccggtactcctgccagattctcaggctccctgcttggaggcaaggctgccctcaccctctcaggggtacagccagaggatgaggcagaatattactgtgttctatggtacagcaaccgctgggtgttcggtggaggaaccaaactgactgtccta

SEQ ID NO: 475 - protein, 497 aa, Artificial Sequence
  H2C HL x Her2/neu LH
EVQLVESGGGLVQPGGSLKLSCAASGFTFNKYAMNWVRQAPGKGLEWVARIRSKYNNYATYYADSVKDRFTISRDDSKNTAYLQMNNLKTEDTAVYYCVRHGNFGNSYISYWAYWGQGTLVTVSSGGGGSGGGGSGGGGSQTVVTQEPSLTVSPGGTVTLTCGSSTGAVTSGYYPNWVQQKPGQAPRGLIGGTKFLAPGTPARFSGSLLGGKAALTLSGVQPEDEAEYYCALWYSNRWVFGGGTKLTVLSGGGGSDIQMTQSPSSLSASVGDRVTITCRASQDVNTAVAWYQQKPGKAPKLLIYSASFLYSGVPSRFSGSRSGTDFTLTISSLQPEDFATYYCQQHYTTPPTFGQGTKVEIKGGGGSGGGGSGGGGSEVQLVESGGGLVQPGGSLRLSCAASGFNIKDTYIHWVRQAPGKGLEWVARIYPTNGYTRYADSVKGRFTISADTSKNTAYLQMNSLRAEDTAVYYCSRWGGDGFYAMDYWGQGTLVTVSS

SEQ ID NO: 476 - DNA, 1491 bp, Artificial Sequence
  H2C HL x Her2/neu LH
gaggtgcagctggtcgagtctggaggaggattggtgcagcctggagggtcattgaaactctcatgtgcagcctctggattcaccttcaataagtacgccatgaactgggtccgccaggctccaggaaagggtttggaatgggttgctcgcataagaagtaaatataataattatgcaacatattatgccgattcagtgaaagacaggttcaccatctccagagatgattcaaaaaacactgcctatctacaaatgaacaacttgaaaactgaggacactgccgtgtactactgtgtgagacatgggaacttcggtaatagctacatatcctactgggcttactggggccaagggactctggtcaccgtctcctcaggtggtggtggttctggcggcggcggctccggtggtggtggttctcagactgttgtgactcaggaaccttcactcaccgtatcacctggtggaacagtcacactcacttgtggctcctcgactggggctgttacatctggctactacccaaactgggtccaacaaaaaccaggtcaggcaccccgtggtctaataggtgggactaagttcctcgcccccggtactcctgccagattctcaggctccctgcttggaggcaaggctgccctcaccctctcaggggtacagccagaggatgaggcagaatattactgtgctctatggtacagcaaccgctgggtgttcggtggaggaaccaaactgactgtcctatccggaggtggtggatccgacatccagatgacccagtcccctagctccctgtccgcctctgtgggcgatagggtcaccatcacctgccgtgccagtcaggatgtgaatactgctgtagcctggtatcaacagaaaccaggaaaagctccgaaactactgatttactcggcatccttcctctactctggagtcccttctcgcttctctggatccagatctgggacggatttcactctgaccatcagcagtctgcagccggaagacttcgcaacttattactgtcagcaacattatactactcctcccacgttcggacagggtaccaaggtggagatcaaaggtggtggtggttctggcggcggcggctccggtggtggtggttctgaggttcagctggtggagtctggcggtggcctggtgcagccagggggctcactccgtttgtcctgtgcagcttctggcttcaacattaaagacacctatatacactgggtgcgtcaggccccgggtaagggcctggaatgggttgcaaggatttatcctacgaatggttatactagatatgccgatagcgtcaagggccgtttcactataagcgcagacacatccaaaaacacagcctacctgcagatgaacagcctgcgtgctgaggacactgccgtctattattgttctaggtggggaggggacggcttctatgctatggactattggggtcaaggaaccctggtcactgtctcctcc

SEQ ID NO: 477 - protein, 497 aa, Artificial Sequence
  F12Q HL x Her2/neu LH
EVQLVESGGGLVQPGGSLKLSCAASGFTFNSYAMNWVRQAPGKGLEWVARIRSKYNNYATYYADSVKGRFTISRDDSKNTAYLQMNNLKTEDTAVYYCVRHGNFGNSYVSWWAYWGQGTLVTVSSGGGGSGGGGSGGGGSQTVVTQEPSLTVSPGGTVTLTCGSSTGAVTSGNYPNWVQQKPGQAPRGLIGGTKFLAPGTPARFSGSLLGGKAALTLSGVQPEDEAEYYCVLWYSNRWVFGGGTKLTVLSGGGGSDIQMTQSPSSLSASVGDRVTITCRASQDVNTAVAWYQQKPGKAPKLLIYSASFLYSGVPSRFSGSRSGTDFTLTISSLQPEDFATYYCQQHYTTPPTFGQGTKVEIKGGGGSGGGGSGGGGSEVQLVESGGGLVQPGGSLRLSCAASGFNIKDTYIHWVRQAPGKGLEWVARIYPTNGYTRYADSVKGRFTISADTSKNTAYLQMNSLRAEDTAVYYCSRWGGDGFYAMDYWGQGTLVTVSS

SEQ ID NO: 478 - DNA, 1491 bp, Artificial Sequence
  F12Q HL x Her2/neu LH
gaggtgcagctggtcgagtctggaggaggattggtgcagcctggagggtcattgaaactctcatgtgcagcctctggattcaccttcaatagctacgccatgaactgggtccgccaggctccaggaaagggtttggaatgggttgctcgcataagaagtaaatataataattatgcaacatattatgccgattcagtgaaaggcaggttcaccatctccagagatgattcaaaaaacactgcctatctacaaatgaacaacttgaaaactgaggacactgccgtgtactactgtgtgagacatgggaacttcggtaatagctacgtttcctggtgggcttactggggccaagggactctggtcaccgtctcctcaggtggtggtggttctggcggcggcggctccggtggtggtggttctcagactgttgtgactcaggaaccttcactcaccgtatcacctggtggaacagtcacactcacttgtggctcctcgactggggctgttacatctggcaactacccaaactgggtccaacaaaaaccaggtcaggcaccccgtggtctaataggtgggactaagttcctcgcccccggtactcctgccagattctcaggctccctgcttggaggcaaggctgccctcaccctctcaggggtacagccagaggatgaggcagaatattactgtgttctatggtacagcaaccgctgggtgttcggtggaggaaccaaactgactgtcctatccggaggtggtggatccgacatccagatgacccagtcccctagctccctgtccgcctctgtgggcgatagggtcaccatcacctgccgtgccagtcaggatgtgaatactgctgtagcctggtatcaacagaaaccaggaaaagctccgaaactactgatttactcggcatccttcctctactctggagtcccttctcgcttctctggatccagatctgggacggatttcactctgaccatcagcagtctgcagccggaagacttcgcaacttattactgtcagcaacattatactactcctcccacgttcggacagggtaccaaggtggagatcaaaggtggtggtggttctggcggcggcggctccggtggtggtggttctgaggttcagctggtggagtctggcggtggcctggtgcagccagggggctcactccgtttgtcctgtgcagcttctggcttcaacattaaagacacctatatacactgggtgcgtcaggccccgggtaagggcctggaatgggttgcaaggatttatcctacgaatggttatactagatatgccgatagcgtcaagggccgtttcactataagcgcagacacatccaaaaacacagcctacctgcagatgaacagcctgcgtgctgaggacactgccgtctattattgttctaggtggggaggggacggcttctatgctatggactattggggtcaaggaaccctggtcactgtctcctcc

SEQ ID NO: 479 - protein, 497 aa, Artificial Sequence
  I2C HL x Her2/neu LH
EVQLVESGGGLVQPGGSLKLSCAASGFTFNKYAMNWVRQAPGKGLEWVARIRSKYNNYATYYADSVKDRFTISRDDSKNTAYLQMNNLKTEDTAVYYCVRHGNFGNSYISYWAYWGQGTLVTVSSGGGGSGGGGSGGGGSQTVVTQEPSLTVSPGGTVTLTCGSSTGAVTSGNYPNWVQQKPGQAPRGLIGGTKFLAPGTPARFSGSLLGGKAALTLSGVQPEDEAEYYCVLWYSNRWVFGGGTKLTVLSGGGGSDIQMTQSPSSLSASVGDRVTITCRASQDVNTAVAWYQQKPGKAPKLLIYSASFLYSGVPSRFSGSRSGTDFTLTISSLQPEDFATYYCQQHYTTPPTFGQGTKVEIKGGGGSGGGGSGGGGSEVQLVESGGGLVQPGGSLRLSCAASGFNIKDTYIHWVRQAPGKGLEWVARIYPTNGYTRYADSVKGRFTISADTSKNTAYLQMNSLRAEDTAVYYCSRWGGDGFYAMDYWGQGTLVTVSS

SEQ ID NO: 480 - DNA, 1491 bp, Artificial Sequence
  I2C HL x Her2/neu LH
gaggtgcagctggtcgagtctggaggaggattggtgcagcctggagggtcattgaaactctcatgtgcagcctctggattcaccttcaataagtacgccatgaactgggtccgccaggctccaggaaagggtttggaatgggttgctcgcataagaagtaaatataataattatgcaacatattatgccgattcagtgaaagacaggttcaccatctccagagatgattcaaaaaacactgcctatctacaaatgaacaacttgaaaactgaggacactgccgtgtactactgtgtgagacatgggaacttcggtaatagctacatatcctactgggcttactggggccaagggactctggtcaccgtctcctcaggtggtggtggttctggcggcggcggctccggtggtggtggttctcagactgttgtgactcaggaaccttcactcaccgtatcacctggtggaacagtcacactcacttgtggctcctcgactggggctgttacatctggcaactacccaaactgggtccaacaaaaaccaggtcaggcaccccgtggtctaataggtgggactaagttcctcgcccccggtactcctgccagattctcaggctccctgcttggaggcaaggctgccctcaccctctcaggggtacagccagaggatgaggcagaatattactgtgttctatggtacagcaaccgctgggtgttcggtggaggaaccaaactgactgtcctatccggaggtggtggatccgacatccagatgacccagtcccctagctccctgtccgcctctgtgggcgatagggtcaccatcacctgccgtgccagtcaggatgtgaatactgctgtagcctggtatcaacagaaaccaggaaaagctccgaaactactgatttactcggcatccttcctctactctggagtcccttctcgcttctctggatccagatctgggacggatttcactctgaccatcagcagtctgcagccggaagacttcgcaacttattactgtcagcaacattatactactcctcccacgttcggacagggtaccaaggtggagatcaaaggtggtggtggttctggcggcggcggctccggtggtggtggttctgaggttcagctggtggagtctggcggtggcctggtgcagccagggggctcactccgtttgtcctgtgcagcttctggcttcaacattaaagacacctatatacactgggtgcgtcaggccccgggtaagggcctggaatgggttgcaaggatttatcctacgaatggttatactagatatgccgatagcgtcaagggccgtttcactataagcgcagacacatccaaaaacacagcctacctgcagatgaacagcctgcgtgctgaggacactgccgtctattattgttctaggtggggaggggacggcttctatgctatggactattggggtcaaggaaccctggtcactgtctcctcc

SEQ ID NO: 481 - protein, 6 aa, Artificial Sequence
  HCDR1 of IgE
SGYSWN

SEQ ID NO: 482 - protein, 16 aa, Artificial Sequence
  HCDR2 of IgE
SITYDGSTNYADSVKG

SEQ ID NO: 483 - protein, 12 aa, Artificial Sequence
  HCDR3 of IgE
GSHYFGHWHFAV

SEQ ID NO: 484 - protein, 15 aa, Artificial Sequence
  LCDR1 of IgE
RASQSVDYDGDSYMN

SEQ ID NO: 485 - protein, 7 aa, Artificial Sequence
  LCDR2 of IgE
AASYLES

SEQ ID NO: 486 - protein, 9 aa, Artificial Sequence
  LCDR3 of IgE
QQSHEDPYT

SEQ ID NO: 487 - protein, 121 aa, Artificial Sequence
  VH of IgE
EVQLVESGGGLVQPGGSLRLSCAVSGYSITSGYSWNWIRQAPGKGLEWVASITYDGSTNYADSVKGRFTISRDDSKNTFYLQMNSLRAEDTAVYYCARGSHYFGHWHFAVWGQGTLVTVSS

SEQ ID NO: 488 - DNA, 363 bp, Artificial Sequence
  VH of IgE
gaggtgcagctggtggagtctgggggaggcttggtccagcctggggggtccctgagactctcctgtgcagtctctggatactccatcaccagcggctacagttggaactggatccgccaggctccagggaaggggctggagtgggtcgcaagtattacgtacgacggtagcacaaactacgcagactccgtgaagggcagattcaccatctccagagacgactccaagaacacgttctatcttcaaatgaacagcctgagagccgaggacacggctgtgtattactgtgcgagaggttcccattatttcggccattggcacttcgccgtgtggggccagggaacgcttgtcacagttagctcc

SEQ ID NO: 489 - protein, 111 aa, Artificial Sequence [sequence omitted]

SEQ ID NO: 490 - DNA, 333 bp, Artificial Sequence
  VL of IgE
gacatccagctgacccagtctccatcctccctgtctgcatctgttggagacagagtcaccatcacttgccgggcaagtcagagcgttgactatgatggggacagctatatgaattggtatcagcagaaaccagggaaagcccctaagctcctgatctatgctgcatcctacttggaaagtggggtcccatcaaggttcagtggcagtggatctgggacagatttcactctcaccatcagcagtctgcaacctgaagattttgcaacttactactgtcaacagtctcatgaagatccatatacctttggacagggcactaaagtcgaaataaag

SEQ ID NO: 491 - protein, 247 aa, Artificial Sequence
  HL of IgE
EVQLVESGGGLVQPGGSLRLSCAVSGYSITSGYSWNWIRQAPGKGLEWVASITYDGSTNYADSVKGRFTISRDDSKNTFYLQMNSLRAEDTAVYYCARGSHYFGHWHFAVWGQGTLVTVSSGGGGSGGGGSGGGGSDIQLTQSPSSLSASVGDRVTITCRASQSVDYDGDSYMNWYQQKPGKAPKLLIYAASYLESGVPSRFSGSGSGTDFTLTISSLQPEDFATYYCQQSHEDPYTFGQGTKVEIK

SEQ ID NO: 492 - DNA, 741 bp, Artificial Sequence
  HL of IgE
gaggtgcagctggtggagtctgggggaggcttggtccagcctggggggtccctgagactctcctgtgcagtctctggatactccatcaccagcggctacagttggaactggatccgccaggctccagggaaggggctggagtgggtcgcaagtattacgtacgacggtagcacaaactacgcagactccgtgaagggcagattcaccatctccagagacgactccaagaacacgttctatcttcaaatgaacagcctgagagccgaggacacggctgtgtattactgtgcgagaggttcccattatttcggccattggcacttcgccgtgtggggccagggaacgcttgtcacagttagctccggtggtggtggttctggcggcggcggctccggtggtggtggttctgacatccagctgacccagtctccatcctccctgtctgcatctgttggagacagagtcaccatcacttgccgggcaagtcagagcgttgactatgatggggacagctatatgaattggtatcagcagaaaccagggaaagcccctaagctcctgatctatgctgcatcctacttggaaagtggggtcccatcaaggttcagtggcagtggatctgggacagatttcactctcaccatcagcagtctgcaacctgaagattttgcaacttactactgtcaacagtctcatgaagatccatatacctttggacagggcactaaagtcgaaataaag

SEQ ID NO: 493 - protein, 247 aa, Artificial Sequence
  LH of IgE
DIQLTQSPSSLSASVGDRVTITCRASQSVDYDGDSYMNWYQQKPGKAPKLLIYAASYLESGVPSRFSGSGSGTDFTLTISSLQPEDFATYYCQQSHEDPYTFGQGTKVEIKGGGGSGGGGSGGGGSEVQLVESGGGLVQPGGSLRLSCAVSGYSITSGYSWNWIRQAPGKGLEWVASITYDGSTNYADSVKGRFTISRDDSKNTFYLQMNSLRAEDTAVYYCARGSHYFGHWHFAVWGQGTLVTVSS

SEQ ID NO: 494 - DNA, 741 bp, Artificial Sequence
  LH of IgE
gacatccagctgacccagtctccatcctccctgtctgcatctgttggagacagagtcaccatcacttgccgggcaagtcagagcgttgactatgatggggacagctatatgaattggtatcagcagaaaccagggaaagcccctaagctcctgatctatgctgcatcctacttggaaagtggggtcccatcaaggttcagtggcagtggatctgggacagatttcactctcaccatcagcagtctgcaacctgaagattttgcaacttactactgtcaacagtctcatgaagatccatatacctttggacagggcactaaagtcgaaataaagggtggtggtggttctggcggcggcggctccggtggtggtggttctgaggtgcagctggtggagtctgggggaggcttggtccagcctggggggtccctgagactctcctgtgcagtctctggatactccatcaccagcggctacagttggaactggatccgccaggctccagggaaggggctggagtgggtcgcaagtattacgtacgacggtagcacaaactacgcagactccgtgaagggcagattcaccatctccagagacgactccaagaacacgttctatcttcaaatgaacagcctgagagccgaggacacggctgtgtattactgtgcgagaggttcccattatttcggccattggcacttcgccgtgtggggccagggaacgcttgtcacagttagctcc

SEQ ID NO: 495 - protein, 502 aa, Artificial Sequence
  IgE HL x H2C HL
EVQLVESGGGLVQPGGSLRLSCAVSGYSITSGYSWNWIRQAPGKGLEWVASITYDGSTNYADSVKGRFTISRDDSKNTFYLQMNSLRAEDTAVYYCARGSHYFGHWHFAVWGQGTLVTVSSGGGGSGGGGSGGGGSDIQLTQSPSSLSASVGDRVTITCRASQSVDYDGDSYMNWYQQKPGKAPKLLIYAASYLESGVPSRFSGSGSGTDFTLTISSLQPEDFATYYCQQSHEDPYTFGQGTKVEIKSGGGGSEVQLVESGGGLVQPGGSLKLSCAASGFTFNKYAMNWVRQAPGKGLEWVARIRSKYNNYATYYADSVKDRFTISRDDSKNTAYLQMNNLKTEDTAVYYCVRHGNFGNSYISYWAYWGQGTLVTVSSGGGGSGGGGSGGGGSQTVVTQEPSLTVSPGGTVTLTCGSSTGAVTSGYYPNWVQQKPGQAPRGLIGGTKFLAPGTPARFSGSLLGGKAALTLSGVQPEDEAEYYCALWYSNRWVFGGGTKLTVL

SEQ ID NO: 496 - DNA, 1506 bp, Artificial Sequence
  IgE HL x H2C HL
gaggtgcagctggtggagtctgggggaggcttggtccagcctggggggtccctgagactctcctgtgcagtctctggatactccatcaccagcggctacagttggaactggatccgccaggctccagggaaggggctggagtgggtcgcaagtattacgtacgacggtagcacaaactacgcagactccgtgaagggcagattcaccatctccagagacgactccaagaacacgttctatcttcaaatgaacagcctgagagccgaggacacggctgtgtattactgtgcgagaggttcccattatttcggccattggcacttcgccgtgtggggccagggaacgcttgtcacagttagctccggtggtggtggttctggcggcggcggctccggtggtggtggttctgacatccagctgacccagtctccatcctccctgtctgcatctgttggagacagagtcaccatcacttgccgggcaagtcagagcgttgactatgatggggacagctatatgaattggtatcagcagaaaccagggaaagcccctaagctcctgatctatgctgcatcctacttggaaagtggggtcccatcaaggttcagtggcagtggatctgggacagatttcactctcaccatcagcagtctgcaacctgaagattttgcaacttactactgtcaacagtctcatgaagatccatatacctttggacagggcactaaagtcgaaataaagtccggaggtggtggatccgaggtgcagctggtcgagtctggaggaggattggtgcagcctggagggtcattgaaactctcatgtgcagcctctggattcaccttcaataagtacgccatgaactgggtccgccaggctccaggaaagggtttggaatgggttgctcgcataagaagtaaatataataattatgcaacatattatgccgattcagtgaaagacaggttcaccatctccagagatgattcaaaaaacactgcctatctacaaatgaacaacttgaaaactgaggacactgccgtgtactactgtgtgagacatgggaacttcggtaatagctacatatcctactgggcttactggggccaagggactctggtcaccgtctcctcaggtggtggtggttctggcggcggcggctccggtggtggtggttctcagactgttgtgactcaggaaccttcactcaccgtatcacctggtggaacagtcacactcacttgtggctcctcgactggggctgttacatctggctactacccaaactgggtccaacaaaaaccaggtcaggcaccccgtggtctaataggtgggactaagttcctcgcccccggtactcctgccagattctcaggctccctgcttggaggcaaggctgccctcaccctctcaggggtacagccagaggatgaggcagaatattactgtgctctatggtacagcaaccgctgggtgttcggtggaggaaccaaactgactgtccta

SEQ ID NO: 497 - protein, 502 aa, Artificial Sequence
  IgE HL x F12Q HL
EVQLVESGGGLVQPGGSLRLSCAVSGYSITSGYSWNWIRQAPGKGLEWVASITYDGSTNYADSVKGRFTISRDDSKNTFYLQMNSLRAEDTAVYYCARGSHYFGHWHFAVWGQGTLVTVSSGGGGSGGGGSGGGGSDIQLTQSPSSLSASVGDRVTITCRASQSVDYDGDSYMNWYQQKPGKAPKLLIYAASYLESGVPSRFSGSGSGTDFTLTISSLQPEDFATYYCQQSHEDPYTFGQGTKVEIKSGGGGSEVQLVESGGGLVQPGGSLKLSCAASGFTFNSYAMNWVRQAPGKGLEWVARIRSKYNNYATYYADSVKGRFTISRDDSKNTAYLQMNNLKTEDTAVYYCVRHGNFGNSYVSWWAYWGQGTLVTVSSGGGGSGGGGSGGGGSQTVVTQEPSLTVSPGGTVTLTCGSSTGAVTSGNYPNWVQQKPGQAPRGLIGGTKFLAPGTPARFSGSLLGGKAALTLSGVQPEDEAEYYCVLWYSNRWVFGGGTKLTVL

SEQ ID NO: 498 - DNA, 1506 bp, Artificial Sequence
  IgE HL x F12Q HL
gaggtgcagctggtggagtctgggggaggcttggtccagcctggggggtccctgagactctcctgtgcagtctctggatactccatcaccagcggctacagttggaactggatccgccaggctccagggaaggggctggagtgggtcgcaagtattacgtacgacggtagcacaaactacgcagactccgtgaagggcagattcaccatctccagagacgactccaagaacacgttctatcttcaaatgaacagcctgagagccgaggacacggctgtgtattactgtgcgagaggttcccattatttcggccattggcacttcgccgtgtggggccagggaacgcttgtcacagttagctccggtggtggtggttctggcggcggcggctccggtggtggtggttctgacatccagctgacccagtctccatcctccctgtctgcatctgttggagacagagtcaccatcacttgccgggcaagtcagagcgttgactatgatggggacagctatatgaattggtatcagcagaaaccagggaaagcccctaagctcctgatctatgctgcatcctacttggaaagtggggtcccatcaaggttcagtggcagtggatctgggacagatttcactctcaccatcagcagtctgcaacctgaagattttgcaacttactactgtcaacagtctcatgaagatccatatacctttggacagggcactaaagtcgaaataaagtccggaggtggtggatccgaggtgcagctggtcgagtctggaggaggattggtgcagcctggagggtcattgaaactctcatgtgcagcctctggattcaccttcaatagctacgccatgaactgggtccgccaggctccaggaaagggtttggaatgggttgctcgcataagaagtaaatataataattatgcaacatattatgccgattcagtgaaaggcaggttcaccatctccagagatgattcaaaaaacactgcctatctacaaatgaacaacttgaaaactgaggacactgccgtgtactactgtgtgagacatgggaacttcggtaatagctacgtttcctggtgggcttactggggccaagggactctggtcaccgtctcctcaggtggtggtggttctggcggcggcggctccggtggtggtggttctcagactgttgtgactcaggaaccttcactcaccgtatcacctggtggaacagtcacactcacttgtggctcctcgactggggctgttacatctggcaactacccaaactgggtccaacaaaaaccaggtcaggcaccccgtggtctaataggtgggactaagttcctcgcccccggtactcctgccagattctcaggctccctgcttggaggcaaggctgccctcaccctctcaggggtacagccagaggatgaggcagaatattactgtgttctatggtacagcaaccgctgggtgttcggtggaggaaccaaactgactgtccta

SEQ ID NO: 499 - protein, 502 aa, Artificial Sequence
  IgE HL x I2C HL
EVQLVESGGGLVQPGGSLRLSCAVSGYSITSGYSWNWIRQAPGKGLEWVASITYDGSTNYADSVKGRFTISRDDSKNTFYLQMNSLRAEDTAVYYCARGSHYFGHWHFAVWGQGTLVTVSSGGGGSGGGGSGGGGSDIQLTQSPSSLSASVGDRVTITCRASQSVDYDGDSYMNWYQQKPGKAPKLLIYAASYLESGVPSRFSGSGSGTDFTLTISSLQPEDFATYYCQQSHEDPYTFGQGTKVEIKSGGGGSEVQLVESGGGLVQPGGSLKLSCAASGFTFNKYAMNWVRQAPGKGLEWVARIRSKYNNYATYYADSVKDRFTISRDDSKNTAYLQMNNLKTEDTAVYYCVRHGNFGNSYISYWAYWGQGTLVTVSSGGGGSGGGGSGGGGSQTVVTQEPSLTVSPGGTVTLTCGSSTGAVTSGNYPNWVQQKPGQAPRGLIGGTKFLAPGTPARFSGSLLGGKAALTLSGVQPEDEAEYYCVLWYSNRWVFGGGTKLTVL

SEQ ID NO: 500 - DNA, 1506 bp, Artificial Sequence
  IgE HL x I2C HL
gaggtgcagctggtggagtctgggggaggcttggtccagcctggggggtccctgagactctcctgtgcagtctctggatactccatcaccagcggctacagttggaactggatccgccaggctccagggaaggggctggagtgggtcgcaagtattacgtacgacggtagcacaaactacgcagactccgtgaagggcagattcaccatctccagagacgactccaagaacacgttctatcttcaaatgaacagcctgagagccgaggacacggctgtgtattactgtgcgagaggttcccattatttcggccattggcacttcgccgtgtggggccagggaacgcttgtcacagttagctccggtggtggtggttctggcggcggcggctccggtggtggtggttctgacatccagctgacccagtctccatcctccctgtctgcatctgttggagacagagtcaccatcacttgccgggcaagtcagagcgttgactatgatggggacagctatatgaattggtatcagcagaaaccagggaaagcccctaagctcctgatctatgctgcatcctacttggaaagtggggtcccatcaaggttcagtggcagtggatctgggacagatttcactctcaccatcagcagtctgcaacctgaagattttgcaacttactactgtcaacagtctcatgaagatccatatacctttggacagggcactaaagtcgaaataaagtccggaggtggtggatccgaggtgcagctggtcgagtctggaggaggattggtgcagcctggagggtcattgaaactctcatgtgcagcctctggattcaccttcaataagtacgccatgaactgggtccgccaggctccaggaaagggtttggaatgggttgctcgcataagaagtaaatataataattatgcaacatattatgccgattcagtgaaagacaggttcaccatctccagagatgattcaaaaaacactgcctatctacaaatgaacaacttgaaaactgaggacactgccgtgtactactgtgtgagacatgggaacttcggtaatagctacatatcctactgggcttactggggccaagggactctggtcaccgtctcctcaggtggtggtggttctggcggcggcggctccggtggtggtggttctcagactgttgtgactcaggaaccttcactcaccgtatcacctggtggaacagtcacactcacttgtggctcctcgactggggctgttacatctggcaactacccaaactgggtccaacaaaaaccaggtcaggcaccccgtggtctaataggtgggactaagttcctcgcccccggtactcctgccagattctcaggctccctgcttggaggcaaggctgccctcaccctctcaggggtacagccagaggatgaggcagaatattactgtgttctatggtacagcaaccgctgggtgttcggtggaggaaccaaactgactgtccta

SEQ ID NO: 501 - protein, 501 aa, Artificial Sequence
  IgE LH x H2C HL
DIQLTQSPSSLSASVGDRVTITCRASQSVDYDGDSYMNWYQQKPGKAPKLLIYAASYLESGVPSRFSGSGSGTDFTLTISSLQPEDFATYYCQQSHEDPYTFGQGTKVEIKGGGGSGGGGSGGGGSEVQLVESGGGLVQPGGSLRLSCAVSGYSITSGYSWNWIRQAPGKGLEWVASITYDGSTNYADSVKGRFTISRDDSKNTFYLQMNSLRAEDTAVYYCARGSHYFGHWHFAVWGQGTLVTVSSGGGGSEVQLVESGGGLVQPGGSLKLSCAASGFTFNKYAMNWVRQAPGKGLEWVARIRSKYNNYATYYADSVKDRFTISRDDSKNTAYLQMNNLKTEDTAVYYCVRHGNFGNSYISYWAYWGQGTLVTVSSGGGGSGGGGSGGGGSQTVVTQEPSLTVSPGGTVTLTCGSSTGAVTSGYYPNWVQQKPGQAPRGLIGGTKFLAPGTPARFSGSLLGGKAALTLSGVQPEDEAEYYCALWYSNRWVFGGGTKLTVL

SEQ ID NO: 502 - DNA, 1503 bp, Artificial Sequence
  IgE LH x H2C HL
gacatccagctgacccagtctccatcctccctgtctgcatctgttggagacagagtcaccatcacttgccgggcaagtcagagcgttgactatgatggggacagctatatgaattggtatcagcagaaaccagggaaagcccctaagctcctgatctatgctgcatcctacttggaaagtggggtcccatcaaggttcagtggcagtggatctgggacagatttcactctcaccatcagcagtctgcaacctgaagattttgcaacttactactgtcaacagtctcatgaagatccatatacctttggacagggcactaaagtcgaaataaagggtggtggtggttctggcggcggcggctccggtggtggtggttctgaggtgcagctggtggagtctgggggaggcttggtccagcctggggggtccctgagactctcctgtgcagtctctggatactccatcaccagcggctacagttggaactggatccgccaggctccagggaaggggctggagtgggtcgcaagtattacgtacgacggtagcacaaactacgcagactccgtgaagggcagattcaccatctccagagacgactccaagaacacgttctatcttcaaatgaacagcctgagagccgaggacacggctgtgtattactgtgcgagaggttcccattatttcggccattggcacttcgccgtgtggggccagggaacgcttgtcacagttagctccggaggtggtggatccgaggtgcagctggtcgagtctggaggaggattggtgcagcctggagggtcattgaaactctcatgtgcagcctctggattcaccttcaataagtacgccatgaactgggtccgccaggctccaggaaagggtttggaatgggttgctcgcataagaagtaaatataataattatgcaacatattatgccgattcagtgaaagacaggttcaccatctccagagatgattcaaaaaacactgcctatctacaaatgaacaacttgaaaactgaggacactgccgtgtactactgtgtgagacatgggaacttcggtaatagctacatatcctactgggcttactggggccaagggactctggtcaccgtctcctcaggtggtggtggttctggcggcggcggctccggtggtggtggttctcagactgttgtgactcaggaaccttcactcaccgtatcacctggtggaacagtcacactcacttgtggctcctcgactggggctgttacatctggctactacccaaactgggtccaacaaaaaccaggtcaggcaccccgtggtctaataggtgggactaagttcctcgcccccggtactcctgccagattctcaggctccctgcttggaggcaaggctgccctcaccctctcaggggtacagccagaggatgaggcagaatattactgtgctctatggtacagcaaccgctgggtgttcggtggaggaaccaaactgactgtccta

SEQ ID NO: 503 - protein, 501 aa, Artificial Sequence
  IgE LH x F12Q HL
DIQLTQSPSSLSASVGDRVTITCRASQSVDYDGDSYMNWYQQKPGKAPKLLIYAASYLESGVPSRFSGSGSGTDFTLTISSLQPEDFATYYCQQSHEDPYTFGQGTKVEIKGGGGSGGGGSGGGGSEVQLVESGGGLVQPGGSLRLSCAVSGYSITSGYSWNWIRQAPGKGLEWVASITYDGSTNYADSVKGRFTISRDDSKNTFYLQMNSLRAEDTAVYYCARGSHYFGHWHFAVWGQGTLVTVSSGGGGSEVQLVESGGGLVQPGGSLKLSCAASGFTFNSYAMNWVRQAPGKGLEWVARIRSKYNNYATYYADSVKGRFTISRDDSKNTAYLQMNNLKTEDTAVYYCVRHGNFGNSYVSWWAYWGQGTLVTVSSGGGGSGGGGSGGGGSQTVVTQEPSLTVSPGGTVTLTCGSSTGAVTSGNYPNWVQQKPGQAPRGLIGGTKFLAPGTPARFSGSLLGGKAALTLSGVQPEDEAEYYCVLWYSNRWVFGGGTKLTVL

SEQ ID NO: 504 - DNA, 1503 bp, Artificial Sequence
  IgE LH x F12Q HL
gacatccagctgacccagtctccatcctccctgtctgcatctgttggagacagagtcaccatcacttgccgggcaagtcagagcgttgactatgatggggacagctatatgaattggtatcagcagaaaccagggaaagcccctaagctcctgatctatgctgcatcctacttggaaagtggggtcccatcaaggttcagtggcagtggatctgggacagatttcactctcaccatcagcagtctgcaacctgaagattttgcaacttactactgtcaacagtctcatgaagatccatatacctttggacagggcactaaagtcgaaataaagggtggtggtggttctggcggcggcggctccggtggtggtggttctgaggtgcagctggtggagtctgggggaggcttggtccagcctggggggtccctgagactctcctgtgcagtctctggatactccatcaccagcggctacagttggaactggatccgccaggctccagggaaggggctggagtgggtcgcaagtattacgtacgacggtagcacaaactacgcagactccgtgaagggcagattcaccatctccagagacgactccaagaacacgttctatcttcaaatgaacagcctgagagccgaggacacggctgtgtattactgtgcgagaggttcccattatttcggccattggcacttcgccgtgtggggccagggaacgcttgtcacagttagctccggaggtggtggatccgaggtgcagctggtcgagtctggaggaggattggtgcagcctggagggtcattgaaactctcatgtgcagcctctggattcaccttcaatagctacgccatgaactgggtccgccaggctccaggaaagggtttggaatgggttgctcgcataagaagtaaatataataattatgcaacatattatgccgattcagtgaaaggcaggttcaccatctccagagatgattcaaaaaacactgcctatctacaaatgaacaacttgaaaactgaggacactgccgtgtactactgtgtgagacatgggaacttcggtaatagctacgtttcctggtgggcttactggggccaagggactctggtcaccgtctcctcaggtggtggtggttctggcggcggcggctccggtggtggtggttctcagactgttgtgactcaggaaccttcactcaccgtatcacctggtggaacagtcacactcacttgtggctcctcgactggggctgttacatctggcaactacccaaactgggtccaacaaaaaccaggtcaggcaccccgtggtctaataggtgggactaagttcctcgcccccggtactcctgccagattctcaggctccctgcttggaggcaaggctgccctcaccctctcaggggtacagccagaggatgaggcagaatattactgtgttctatggtacagcaaccgctgggtgttcggtggaggaaccaaactgactgtccta

SEQ ID NO: 505 - protein, 501 aa, Artificial Sequence
  IgE LH x I2C HL
DIQLTQSPSSLSASVGDRVTITCRASQSVDYDGDSYMNWYQQKPGKAPKLLIYAASYLESGVPSRFSGSGSGTDFTLTISSLQPEDFATYYCQQSHEDPYTFGQGTKVEIKGGGGSGGGGSGGGGSEVQLVESGGGLVQPGGSLRLSCAVSGYSITSGYSWNWIRQAPGKGLEWVASITYDGSTNYADSVKGRFTISRDDSKNTFYLQMNSLRAEDTAVYYCARGSHYFGHWHFAVWGQGTLVTVSSGGGGSEVQLVESGGGLVQPGGSLKLSCAASGFTFNKYAMNWVRQAPGKGLEWVARIRSKYNNYATYYADSVKDRFTISRDDSKNTAYLQMNNLKTEDTAVYYCVRHGNFGNSYISYWAYWGQGTLVTVSSGGGGSGGGGSGGGGSQTVVTQEPSLTVSPGGTVTLTCGSSTGAVTSGNYPNWVQQKPGQAPRGLIGGTKFLAPGTPARFSGSLLGGKAALTLSGVQPEDEAEYYCVLWYSNRWVFGGGTKLTVL

SEQ ID NO: 506 - DNA, 1503 bp, Artificial Sequence
  IgE LH x I2C HL
gacatccagctgacccagtctccatcctccctgtctgcatctgttggagacagagtcaccatcacttgccgggcaagtcagagcgttgactatgatggggacagctatatgaattggtatcagcagaaaccagggaaagcccctaagctcctgatctatgctgcatcctacttggaaagtggggtcccatcaaggttcagtggcagtggatctgggacagatttcactctcaccatcagcagtctgcaacctgaagattttgcaacttactactgtcaacagtctcatgaagatccatatacctttggacagggcactaaagtcgaaataaagggtggtggtggttctggcggcggcggctccggtggtggtggttctgaggtgcagctggtggagtctgggggaggcttggtccagcctggggggtccctgagactctcctgtgcagtctctggatactccatcaccagcggctacagttggaactggatccgccaggctccagggaaggggctggagtgggtcgcaagtattacgtacgacggtagcacaaactacgcagactccgtgaagggcagattcaccatctccagagacgactccaagaacacgttctatcttcaaatgaacagcctgagagccgaggacacggctgtgtattactgtgcgagaggttcccattatttcggccattggcacttcgccgtgtggggccagggaacgcttgtcacagttagctccggaggtggtggatccgaggtgcagctggtcgagtctggaggaggattggtgcagcctggagggtcattgaaactctcatgtgcagcctctggattcaccttcaataagtacgccatgaactgggtccgccaggctccaggaaagggtttggaatgggttgctcgcataagaagtaaatataataattatgcaacatattatgccgattcagtgaaagacaggttcaccatctccagagatgattcaaaaaacactgcctatctacaaatgaacaacttgaaaactgaggacactgccgtgtactactgtgtgagacatgggaacttcggtaatagctacatatcctactgggcttactggggccaagggactctggtcaccgtctcctcaggtggtggtggttctggcggcggcggctccggtggtggtggttctcagactgttgtgactcaggaaccttcactcaccgtatcacctggtggaacagtcacactcacttgtggctcctcgactggggctgttacatctggcaactacccaaactgggtccaacaaaaaccaggtcaggcaccccgtggtctaataggtgggactaagttcctcgcccccggtactcctgccagattctcaggctccctgcttggaggcaaggctgccctcaccctctcaggggtacagccagaggatgaggcagaatattactgtgttctatggtacagcaaccgctgggtgttcggtggaggaaccaaactgactgtccta

SEQ ID NO: 507 - DNA, 2261 bp, Macaca mulatta
gaattccaccatgggatggagctgtatcatcctcttcttggtagcaacagctacaggtaaggggctcacagtagcaggcttgaggtctggacatatatatgggtgacaatgacatccactttgcctttctctccttagggtgtacactcccaggtccaactgcaccagcctggggctgagcttgtgaagcctggggcttcagtgaagctgtcctgcaaggcttctggctacaccttcaccagctactggatgcactgggtgaagcagaggcctggacgaggccttgagtggattggaaggattgatcctaatagtggtggtactaagtacaatgagaagttcaagagcaaggccacactgactgtagacaaaccctccagcacagcctacatgcagctcagcagcctgacatctgaggactctgcggtctattattgtgcaagatacgattactacggtagtagctactttgactactggggccaaggcaccactctcacagtctcctcaggtgagtccttacaacctctctcttctattcagcttaaatagattttactgcatttgttgggggggaaatgtgtgtatctgaatttcaggtcatgaaggactagggacaccttgggagtcagaaagggtcattgggagccctggctgatgcagacagacatcctcagctcccagacttcatggccagagatttatagggatccactagttctagatgtcccacaccgcggtcacatggcaccacctctcttgcagcctccatacagagcccattcgtcttccccttgatcccctgctgcaaacacattgcctccaatgccacctccgtgactctgggctgcctggccacgggctacttcccggagccggtgatggtcacttgggacgcaggctccctcaaccggtcaactatgaccttaccagccaccaccttcacgccctctggtcactatgccaccatcagcttgctgaccgtctcgggtgcgtgggccaaggagactttcacctgccatgtggtacacactccatcgtccgcagacaaggaggttaacaaaaccttcggcgtctgctccaggaacttcaccccgcccaccgtgaagatcttacagtcgtcctgcgacgatgacgggcacttccccccgaccatccagctcctgtgcctcatctctgggtacaccccaggggctatcaacgtcacctggctggagaacgggcaggtcatgaaagtgaactcgcccaccccccctgcaacgcaggagggtgagctggcctccacacaaagcgagtttaccctcgctcagaagcagtggctgacagaccgcaactacacctgccaagtcacctatcaaggtaccacctataacgacagcaccaagaagtgtgcagattccaacccgagaggggtgagcgcctacctaagccggcccagcccgttcgacctgttcatcagcaagtcgcccacgatcacctgtctggtggtggacctggcacccagcaaggagaccgtgaacctgacctggtcccgggccagtgggaagcctgtgccccacatccccacaacggagaagaagcagcgcaatggcacgttaaccgtcacgtccatcctgccggtagtcacccaagactggatcgagggggagacctaccagtgcagagtcacccacccccacctgcccagggccctcgtgcggtccatgaccaagaccagcggcccgcgtgctgccccggaagtctatgtgtttgcgacgccggagaagctggagagccgggacaagcgcaccctcgcctgcctgatccagaacttcatgcctgaagacatctcggtgcagtggctgcacagcgatgtgcagctcccggacgcccggcacagcgtgacgcagccccgcaagaccaagggctccggcttcttcgtcttcagccgcctggaagtgaccaaggccgaatgggagcagaaagatgagttcatctgccgtgcagtccatgaggcagcgagcccctcatggatcgtccagcaagcggtgtctgtaaatcccgagctggacgtgtgcgtggaggaggccgagggcgaggcgccgtggacgtggaccggcctctgcatcttcgccgcactcttcctgctcagcgtgagctacagcgccgccctcacgctcctcatggtgcagcggttcctctcagccacgcggcaggggaggccccagacctccctcgactacaccaacgtcctccagccccacgcctagtctagagtcgac

SEQ ID NO: 508 - DNA, 2677 bp, Homo sapiens
gaattccaccatgggatggagctgtatcatcctcttcttggtagcaacagctacaggtaaggggctcacagtagcaggcttgaggtctggacatatatatgggtgacaatgacatccactttgcctttctctccttagggtgtacactcccaggtccaactgcaccagcctggggctgagcttgtgaagcctggggcttcagtgaagctgtcctgcaaggcttctggctacaccttcaccagctactggatgcactgggtgaagcagaggcctggacgaggccttgagtggattggaaggattgatcctaatagtggtggtactaagtacaatgagaagttcaagagcaaggccacactgactgtagacaaaccctccagcacagcctacatgcagctcagcagcctgacatctgaggactctgcggtctattattgtgcaagatacgattactacggtagtagctactttgactactggggccaaggcaccactctcacagtctcctcaggtgagtccttacaacctctctcttctattcagcttaaatagattttactgcatttgttgggggggaaatgtgtgtatctgaatttcaggtcatgaaggactagggacaccttgggagtcagaaagggtcattgggagccctggctgatgcagacagacatcctcagctcccagacttcatggccagagatttataggggatccctgccacggggtccccagctcccccatccaggccccccaggctgatgggcgctggcctgaggctggcactgactaggttctgtcctcacagcctccacacagagcccatccgtcttccccttgacccgctgctgcaaaaacattccctccaatgccacctccgtgactctgggctgcctggccacgggctacttcccggagccggtgatggtgacctgggacacaggctccctcaacgggacaactatgaccttaccagccaccaccctcacgctctctggtcactatgccaccatcagcttgctgaccgtctcgggtgcgtgggccaagcagatgttcacctgccgtgtggcacacactccatcgtccacagactgggtcgacaacaaaaccttcagcggtaagagagggccaagctcagagaccacagttcccaggagtgccaggctgagggctggcagagtgggcaggggttgagggggtgggtgggctcaaacgtgggaacacccagcatgcctggggacccgggccaggacgtgggggcaagaggagggcacacagagctcagagaggccaacaaccctcatgaccaccagctctcccccagtctgctccagggacttcaccccgcccaccgtgaagatcttacagtcgtcctgcgacggcggcgggcacttccccccgaccatccagctcctgtgcctcgtctctgggtacaccccagggactatcaacatcacctggctggaggacgggcaggtcatggacgtggacttgtccaccgcctctaccacgcaggagggtgagctggcctccacacaaagcgagctcaccctcagccagaagcactggctgtcagaccgcacctacacctgccaggtcacctatcaaggtcacacctttgaggacagcaccaagaagtgtgcaggtacgttcccacctgccctggtggccgccacggaggccagagaagaggggcgggtgggcctcacacagccctccggtgtaccacagattccaacccgagaggggtgagcgcctacctaagccggcccagcccgttcgacctgttcatccgcaagtcgcccacgatcacctgtctggtggtggacctggcacccagcaaggggaccgtgaacctgacctggtcccgggccagtgggaagcctgtgaaccactccaccagaaaggaggagaagcagcgcaatggcacgttaaccgtcacgtccaccctgccggtgggcacccgagactggatcgagggggagacctaccagtgcagggtgacccacccccacctgcccagggccctcatgcggtccacgaccaagaccagcggtgagccatgggcaggccggggtcgtgggggaagggagggagcgagtgagcggggcccgggctgaccccacgtctggccacaggcccgcgtgctgccccggaagtctatgcgtttgcgacgccggagtggccggggagccgggacaagcgcaccctcgcctgcctgatccagaacttcatgcctgaggacatctcggtgcagtggctgcacaacgaggtgcagctcccggacgcccggcacagcacgacgcagccccgcaagaccaagggctccggcttcttcgtcttcagccgcctggaggtgaccagggccgaatgggagcagaaagatgagttcatctgccgtgcagtccatgaggcagcgagcccctcacagaccgtccagcgagcggtgtctgtaaatcccgagctggacgtgtgcgtggaggaggccgagggcgaggcgccgtggacgtggaccggcctctgcatcttcgccgcactcttcctgctcagcgtgagctacagcgccgccctcacgctcctcatggtgcagcggttcctctcagccacgcggcaggggaggccccagacctccctcgactacaccaacgtcctccagccccacgcctagtctagagtcgac

SEQ ID NO: 509 - protein, 5 aa, Artificial Sequence
  Synthetic peptide
QDGNE

SEQ ID NO: 510 - protein, 10 aa, Artificial Sequence
  Synthetic polypeptide
TGDYKDDDDK

SEQ ID NO: 511 - DNA, 34 bp, Homo sapiens
ggtctagagcatgcgaccctccgggacggccggg

SEQ ID NO: 512 - DNA, 36 bp, Homo sapiens
ttttaagtcgactcatgctccaataaattcactgct

SEQ ID NO: 513 - DNA, 22 bp, Artificial Sequence
  Synthetic primer
cgctctgcccggcgagtcgggc

SEQ ID NO: 514 - DNA, 22 bp, Artificial Sequence
  Synthetic primer
ccgtcttcctccatctcatagc

SEQ ID NO: 515 - DNA, 31 bp, Artificial Sequence
  Synthetic primer
acatccggaggtgacagatcacggctcgtgc

SEQ ID NO: 516 - DNA, 30 bp, Artificial Sequence
  Synthetic primer
caggatatccgaacgatgtggcgccttcgc

SEQ ID NO: 517 - protein, 9 aa, Artificial Sequence
  Linker
SRTRSGSQL

SEQ ID NO: 518 - DNA, 22 bp, Artificial Sequence
  Synthetic primer
gatctggtctacaccatcgagc

SEQ ID NO: 519 - DNA, 24 bp, Artificial Sequence
  Synthetic primer
ggagctgctgctggctcagtgagg

SEQ ID NO: 520 - DNA, 23 bp, Artificial Sequence
  Synthetic primer
ttccagctgagcatgtctgatgg

SEQ ID NO: 521 - DNA, 21 bp, Artificial Sequence
  Synthetic primer
cgatcagcatctgggcccagg

SEQ ID NO: 522 - DNA, 25 bp, Artificial Sequence
  Synthetic primer
gtggagcagttcactcagcaggacc

SEQ ID NO: 523 - DNA, 22 bp, Artificial Sequence
  Synthetic primer
gccttcacacccagtactggcc

SEQ ID NO: 524 - DNA, 59 bp, Artificial Sequence
  Synthetic primer
tcccgtacgagatctggatcccaattggatggcggactcgtgctgttctcacacagagg

SEQ ID NO: 525 - DNA, 45 bp, Artificial Sequence
  Synthetic primer
agtgggtcgactcacacccagtactggccattcttaagggcaggg

SEQ ID NO: 526 - DNA, 288 bp, Callithrix jacchus
  misc_feature: Polynucleotide sequence encoding the amino acid sequence of SEQ ID NO: 3
caggacggtaatgaagaaatgggtgatactacacagaacccatataaagtttccatctcaggaaccacagtaacactgacatgccctcggtatgatggacatgaaataaaatggctcgtaaatagtcaaaacaaagaaggtcatgaggaccacctgttactggaggacttttcggaaatggagcaaagtggttattatgcctgcctctccaaagagactcccgcagaagaggcgagccattatctctacctgaaggcaagagtgtgtgagaactgcgtggaggtggat

SEQ ID NO: 527 - DNA, 288 bp, Saguinus oedipus
  misc_feature: Polynucleotide sequence encoding the amino acid sequence of SEQ ID NO: 5
caggacggtaatgaagaaatgggtgatactacacagaacccatataaagtttccatctcaggaaccacagtaacactgacatgccctcggtatgatggacatgaaataaaatggcttgtaaatagtcaaaacaaagaaggtcatgaggaccacctgttactggaggatttttcggaaatggagcaaagtggttattatgcctgcctctccaaagagactcccgcagaagaggcgagccattatctctacctgaaggcaagagtgtgtgagaactgcgtggaggtggat

SEQ ID NO: 528 - DNA, 288 bp, Saimiri sciureus
  misc_feature: Polynucleotide sequence encoding the amino acid sequence of SEQ ID NO: 7
caggacggtaatgaagagattggtgatactacccagaacccatataaagtttccatctcaggaaccacagtaacactgacatgccctcggtatgatggacaggaaataaaatggctcgtaaatgatcaaaacaaagaaggtcatgaggaccacctgttactggaagatttttcagaaatggaacaaagtggttattatgcctgcctctccaaagagacccccacagaagaggcgagccattatctctacctgaaggcaagagtgtgtgagaactgcgtggaggtggat

SEQ ID NO: 529 - DNA, 20 bp, Artificial Sequence
  Thioate-modified CpG oligonucleotide
tccatgacgttcctgatgct

SEQ ID NO: 530 - DNA, 27 bp, Artificial Sequence
  5' VH-specific PCR primer no. 1
saggtgcagctcgaggagtcaggacct

SEQ ID NO: 531 - DNA, 27 bp, Artificial Sequence
  5' VH-specific PCR primer no. 2
gaggtccagctcgagcagtctggacct

SEQ ID NO: 532 - DNA, 27 bp, Artificial Sequence
  5' VH-specific PCR primer no. 3
caggtccaactcgagcagcctggggct

SEQ ID NO: 533 - DNA, 27 bp, Artificial Sequence
  5' VH-specific PCR primer no. 4
  misc_feature (5)..(6): n is an inosine-containing nucleotide
gaggnncagctcgagcagtctggggca

SEQ ID NO: 534 - DNA, 27 bp, Artificial Sequence
  5' VH-specific PCR primer no. 5
gargtgaagctcgaggagtctggagga

SEQ ID NO: 535 - DNA, 27 bp, Artificial Sequence
  5' VH-specific PCR primer no. 6
  misc_feature (12)..(12): n is an inosine-containing nucleotide
gaggtgaagctnctcgagtctggaggt

SEQ ID NO: 536 - DNA, 27 bp, Artificial Sequence
  5' VH-specific PCR primer no. 7
gaagtgaagctcgaggagtctggggga

SEQ ID NO: 537 - DNA, 27 bp, Artificial Sequence
  5' VH-specific PCR primer no. 8
gaggttcagctcgagcagtctggagct

SEQ ID NO: 538 - DNA, 34 bp, Artificial Sequence
  Single 3' VH-specific PCR primer
tgaggagacggtgaccgtggtcccttggccccag

SEQ ID NO: 539 - DNA, 32 bp, Artificial Sequence
  5' VK-specific PCR primer no. 1
ccagttccgagctcgttgtgactcaggaatct

SEQ ID NO: 540 - DNA, 32 bp, Artificial Sequence
  5' VK-specific PCR primer no. 2
ccagttccgagctcgtgttgacgcagccgccc

SEQ ID NO: 541 - DNA, 32 bp, Artificial Sequence
  5' VK-specific PCR primer no. 3
ccagttccgagctcgtgctcacccagtctcca

SEQ ID NO: 542 - DNA, 32 bp, Artificial Sequence
  5' VK-specific PCR primer no. 4
ccagttccgagctccagatgacccagtctcca

SEQ ID NO: 543 - DNA, 32 bp, Artificial Sequence
  5' VK-specific PCR primer no. 5
ccagatgtgagctcgtgatgacccagactcca

SEQ ID NO: 544 - DNA, 32 bp, Artificial Sequence
  5' VK-specific PCR primer no. 6
ccagatgtgagctcgtcatgacccagtctcca

SEQ ID NO: 545 - DNA, 32 bp, Artificial Sequence
  5' VK-specific PCR primer no. 7
ccagttccgagctcgtgatgacacagtctcca

SEQ ID NO: 546 - DNA, 39 bp, Artificial Sequence
  Single 3' VK-specific PCR primer
tggtgcactagtcgtacgtttgatctcaagcttggtccc

SEQ ID NO: 547 - protein, 27 aa, Homo sapiens
QDGNEEMGGLTQTPYKVSLSGTTVILT

SEQ ID NO: 548 - protein, 4 aa, Artificial Sequence
  Spacer
GGGS

SEQ ID NO: 549 - protein, 8 aa, Artificial Sequence
  Synthetic polypeptide
QDGNEEMG

SEQ ID NO: 550 - protein, 8 aa, Artificial Sequence
  Synthetic polypeptide
QDGNEEIG

SEQ ID NO: 551 - protein, 8 aa, Artificial Sequence
  Synthetic polypeptide
  misc_feature (7)..(7): Xaa can be any naturally occurring amino acid
GDGNEEXG
